United States Patent Application Publication US 2015/0052636 A1 - sequence listing, part 33

SEQ ID NO: 115655 - DNA, 251 bp, Physcomitrella patens
  Intron number 1 from transcript Pp1s158_140V6.1 (locus Pp1 s158_140V6) derived from phytozome v7.0 (chr-ID scaffold_1 58; pos 702804 to 703054 reverse strand)
aattgccattggtaagacttatactagaaaccaaagtaaatatgtctttgattaaatgtatcaattattatttatagtttttttctcactcttctttaaattaatggtgtttacatgcctttgtatgaactcaagttagtaagactaaattaaaatgtaatatatgtattattcttattttttttgttaatttgtggttaaatttgttaattgtaggttgaatcatctggagaggaaatatttggtagagc

SEQ ID NO: 115656 - DNA, 552 bp, Physcomitrella patens
  Intron number 2 from transcript Pp1s129_90V6.1 (locus Pp1s 129_90V6) derived from phytozome v7.0 (chr-ID scaffold_129 ; pos 595190 to 595741 reverse strand)
ttcaaccaatgtatgcaatctctccaaatcagtataatttttcgttctcgttattggttccctccccgggtcccttttttatttgactctttactttattttattacgtctgtttcgtttttcccatttttcaaattactttggttagtttgctggtgctcttttggggggtctggcagtatataagctactacgaatccaatagatacagtatgtttaggaccagcttaaaagtaggttaaacagtgttataagcaagcactgattaagatatttgtgaattgcgctatgaatttcacatgagatgtttcttgttcctcctgaaggaaagttggtgatcaccgacagccaccctgaacaatatcatctcaacagtaaaatcacacgcggtaatttatcttagaacaaaagtgaaggatacagcatgaagaatggcatgtgctcactatgatgataatcatcttattatacgttacaactcattcatcagaactaatctggtcatttttgttatttgtctttgaacagtgtctgcagttgctggcctcagcc

SEQ ID NO: 115657 - DNA, 462 bp, Physcomitrella patens
  Intron number 1 from transcript Pp1s89_147V6.1 (locus Pp1s 89_147V6) derived from phytozome v7.0 (chr-ID scaffold_89; pos 775275 to 775736 reverse strand)
cgtgccaagattgatcgtgcaatcaaagcgaggtacgaatgttttattctttattatctacttttatgataaattattcatatttggttttgtttggttgtaaatattgtatatattagcatcaaaaacataatctcaggtacttcgtctaggagtaatgcattcagcctgtccacctgtaggcaacaggattcgtcgttaacctaaacctaatgttgtgcttcctataaatcgtcacttcggggcaaattgttttgtgaacttgcaacctattacaaaatgtggcatcagttccagtggcggagtttttgaaattagagttgcttatcttcaatggcgtagtgaggacttggatcaagagatagtacgttagagagcttgagaggtatctgaaatggtacccatgtacttcttttctctggcacagtttaacgaaagaaaagaagaagaggacaggtggtg

SEQ ID NO: 115658 - DNA, 967 bp, Physcomitrella patens
  Intron number 1 from transcript Pp1s74_128V6.1 (locus Pp1s 74_128V6) derived from phytozome v7.0 (chr-ID scaffold_74; pos 827496 to 828462 reverse strand)
caggtagagctcagtttcttgccttttgaaaattggtattttgttccaagtttttgtgaatgctgactttatgatccaggcggtggtgttgttgggttattatttgtacttgatacatctgcaatgatcgatctcattcaagttctctttggctccgttcgctggttatgagggtctctacgggtattcattgattggtgactcttcagtatgtgcttgaacatatcacgaattcccggcttaatattttctggctaacagcagcttacttttaggtaggaattctcgcaaaaatattttttaaactgatgtatcacccttttcgtatcacttttacctacagcatatattcttcgggaataaagcctttcacctagatccgggaattcgttgccgaatatgccttcaattaatgctccaatttgatccgatcaatccacctcaaagacatttgatcttctagcatgtcatgatggtgtacaaaacaaattatgatcgtcaaaacctcaatgtctgtagttcgtattcatttatctttcattactgtggggttacactcgatttctaaatacgacaagggagcaatgtcttggtttgtttctgacagcttgagaggacttttccgtcctgtgcaatgcaccaatgtttttcttcgaatttctgctcgtacttgaaaatgattttcaattctattacaaatctgcagatctggaatttgattgaaccttcacatgtgtgcactagcaccagctggtcgtgatatcaagcaaaattacgtcaaacttgattatccccgggaatgatcttaaaacgccgatgaatggcagcttcctcccaagaatctctaaatagcattatccaggctggcggttagaatcacatgcctgacagacccttgcacagaatttatccctgctgtgacaaaaaagacacttaattgtcagctacaatatccacgttgacgagg

SEQ ID NO: 115659 - DNA, 716 bp, Physcomitrella patens
  Intron number 1 from transcript Pp1s222_108V6.1 (locus Pp1 s222_108V6) derived from phytozome v7.0 (chr-ID scaffold_2 22; pos 602883 to 603598)
gaggattggagaggtaagcacccggactggttgccatttgtgatgccgtttgtgtcgcccatctgcacctggtgcaatttttttttctgttggctatagccttgatgtgagtagttagcggtaactggagcctggtagtcatgaatcggcgatgtgaaggctactcgagcggcattgaaatacggaagttgcaagggaatccttaaatgattaaaaagaaacatgttggagaacgccatcgacagtgtagggtttagggttttgttctttgaacccgagaatataacttgttagattttctgaagcagaacagtgtagtcttcgttgaatcttggcaagggtatgtcaaacaagggttaaaaacccaatttagggaatcgtaattttttgaaaaagtgtgcacaatggagatgagtactaagacacacacacacacacacacagagagagagagagagagagagagctgcttttattgggattcctctgtttaagtacttctctgattttttggcttcctggagatgcatgaagtcttgcacggatgccatcataaccttcataaacaaactcaaattgtagattgtgattttcatgtgccttcgatgttgttatccgcattgtttagagcatcttttgcataatgtttttagagcactctttctgtgcaattgaatatctgcttgtaattgatatcaaggaagattcggctcagg

SEQ ID NO: 115660 - DNA, 325 bp, Physcomitrella patens
  Intron number 1 from transcript Pp1s194_46V6.1 (locus Pp1s 194_46V6) derived from phytozome v7.0 (chr-ID scaffold_194 ; pos 209124 to 209448)
agtgtaggagcgtatactttaggtggggtctcaaggtatgattctgcttgttttgaatagctgtgtgccaattctggaagattgtttattatgagttttgttgtggatgtttttcagatctttagcaattttttagagcaaacggtgttcaaggttggttttcattacatgtatttttgatgatgttgaaactgatttttttttttttttcttcttttatgattttacagttatagtttcgtctgaaattcaacagatttggctgagtctttacttttctttcttattaggttgcctgcattacaattttacgacgagttcacgc

SEQ ID NO: 115661 - DNA, 660 bp, Physcomitrella patens
  Intron number 1 from transcript Pp1s36_218V6.1 (locus Pp1s 36_218V6) derived from phytozome v7.0 (chr-ID scaffold_36; pos 1399192 to 1399851)
agctgcatcggagatcttggtttggggcttaataggtacgtacgctaaggttttcagtcattgtcctgggcgtcggtatttttccgacgaaaactgtggtgcttttatttggaagcttagcacgcatgtaggtgctgtagaagaaaatgtatcttttgagttggcatattccactatgagcattttttcaatgcgatagtattgtggcaacgctgtgattttcgccccatctttgctgtaaagaatgctatcacctggaaaaatgtactagagttcatattgctccagtctatagaaccagatctgcacataagaaatacttgtagctatgtttcggacctctccaccacttgtggtagaagactcgtacgcatagagagttgaatgatttgaaagcatgaatccttttcttcttcatcaatatagtttcttgagcaggtgattaaagtctgttcgcgaacccttaactgtgaagaatttttacagaggaacgtctatattcgtggttcatgttcaattttcaaccctaccgacgggttgccaagttaagcaacagttattccataattttgttaacttgaactggtgagagattctcagttcttaccggatatttgcactaagaggatataactcacgtcacgaatgtcgtttttgcag

SEQ ID NO: 115662 - DNA, 394 bp, Physcomitrella patens
  Intron number 1 from transcript Pp1s21_282V6.2 (locus Pp1s 21_282V6) derived from phytozome v7.0 (chr-ID scaffold_21; pos 1642387 to 1642780 reverse strand)
gctgcttgtggagagagcttccatccaatcttcaggttttttttttttttttttttttttttttttcttcttcttatggttactctgcttttttggttatataaatcagtctatcgcaagtgttttagtcttctgcacatttgaccttttctggataatttcttaatgaccttcaatactaaattatctggcgtttgattacagctcttttatactggtgggtgtttgttattcaatttgggtttccatgaattcagcatttcagcaatatctgatgcacggaaattttagagagttggtaagggagtatttgtaattgtagtattttttatttatttatttatttatttattttttacgatttaaaaatgcaggagacgcgggagttattcaa

SEQ ID NO: 115663 - DNA, 977 bp, Physcomitrella patens
  Intron number 1 from transcript Pp1s212_18V6.1 (locus Pp1s 212_18V6) derived from phytozome v7.0 (chr-ID scaffold_212 ; pos 95481 to 96457)
tgcagcgagtggacgcgcctgtgactgtacgtttctctgggggtagttttagttccctgtgagttttttttttttttttttttttttttttttttttggtttcagggtggagtgatgtctctgcagatttttgcttttggcagggcgaaattggtcttcgtgatttttacctgaaccctcccctcacctaaaagtataaccagtataataaataaaaaagaatgcagctactgtttggagagtttgggtttggacggaaatggaatcttgtgaagcttctgtaagatatttttttctcgacgggcctatgtcgcttcctactctaattctttgggtatccgagttttcacgaagtactatcaacctaaaccataaccatagtttgttatataatttattccgcaatttttgttcttatatagccggaatttgataggacatcaactgctgggctctctctttctcagtgtttgtgttgtacaacatctgtcgtggaatttcttgaagggttcgttcaagtgattgtgcggcacattttttgcactgtagcgagcgttggagcgattgtgaatctgagaagtactcatcacacagctagtgtactgctaatttcgcataatggttctcacagattgttgtgttgatacatcatatttgtgtagtttgcatggccattctgtcttgactttcatctgaaccgtctttgtgttatggttccacatcgtgtgtgcttacagtgattccatctcatgcacctctcttcatccagacgagctcattcgttactggattacctgttttgtatgtatttgttcgaaatagtagcaagctcctgcggatcagaattagggtgtcaattacatgcagggaatgcgtgtaattattgggaataagctttgttccttttctgaacgtgtaatcgacactaaagttgtgcatctgaacacctttgacatcacagatttgcggtgacattc

SEQ ID NO: 115664 - DNA, 982 bp, Physcomitrella patens
  Intron number 1 from transcript Pp1s66_87V6.1 (locus Pp1s6 6_87V6) derived from phytozome v7.0 (chr-ID scaffold_66; p os 357720 to 358701 reverse strand)
ctcgagagcgcaagaaaggtacgcttttggtgctcaattggtcgttttcaacacctggagagcaacatgtagttatttaataccttaatgtttaacgtttagtttctctattacggaaattggctttccgacgtttaactacattgcttgtattgtatgttagaaataggtttggtattatggagatgggatctgtttgggtagcttgaattgtgagctgaagcgtgcttaaataccaaatctaagttgtaaaattgaactcagatcatttacccaaatttttgtgaaagtttggacgaatgaaacagttttcttagttgttccatgggatgggaaatttcagagcagtgagcttttaggttttgttggcgatgacatttcatgtttcatagattacacatatgggcaatgatctgagatgcaagttttggaacgtctttgttagtgtttctgtggagattagtaagtagcaagtcataatgttcatggttgggttttcaattgcttttcagtatgatgttatggtaggaattccagaggaagatactcttgttttacatttagtaccctcaaaatagaattcaatagccaccttgcaaattccagagatttttcagatatgcatatcaatgatctgtttactctaaacttcaaaccaaactcacaaatgatgaggtggattgtccaagtgtgtagtgttaaattatcgtgaaaacttttctgtagtgaggaaaaatgcctttcaaaagaatgtcgtagtccggtagattcgcattcaatgaaatccacatccgtttcgaatgcgttgctaaactgcaaatattgttatcagttcggtattactgttttgactgttccatacccaagcgctgatttggttgcgtttcatccactcaagtcattctgaaagtcggttgctcataacaaatagtttgtccctgttgcaggagtaccgtggacagaagacgagcatcgcttgttc

SEQ ID NO: 115665 - DNA, 933 bp, Physcomitrella patens
  Intron number 1 from transcript Pp1s67_121V6.1 (locus Pp1s 67_121V6) derived from phytozome v7.0 (chr-ID scaffold_67; pos 897215 to 898147)
cctgcattcccctctcaggacttacctgggtacgctccttgtggttgggtttcgttttgctgaagtttttgggtggtgggttcgatcttgacacttggaagagcgcgagttgcgtgttgttgttgttgttggtttttgtgtgtgtatatgttgagtgtgccgtttgagaggtacgatgatgaggagttgtttgcgaagtggggttctaatgtgcgtgctgctggtttgcgtttctgggtgtatcgtgtctgtgatttaattttcatagtctgtttttctttttgctcttttttttaaaaaaaattaacttaaatttctggcagatttaaactgtgtgtgggggtattgccaagcttgtacagagtaatggggaataggggaatttttttgctgttgtaggagttgagttttgagtgagatcctgaattctagcgggtgcgtgttttggtcgtatacctgtcttttcttggtaagacaatgggcagttgtgttcagtttgaattggggcggcgatctggaggcgaggatgtcattgggtgtttcagctactcagatagttggcggctttgggagaataatagaattttctccgtaacacaatggaatagagcgagtctagttacaatggcactaactaaactgaacatttcatgtgcccaatttgtgagctagcccttgcttgtctgctactgcgtacaatcgcactaatgtctatactgcccttgtgagccacaatttcttcgagtattcagccgtctgagtgtgttattatgcatcgcagcttgctttgagttaagtacagttgtaaatccttggaggtcgatgtgggggaccattttgggtcaaagttgatatgtccggtttgatgtgaacattcttccctttctttgtgttccagggtgactgaaaacattgtgtagacaacgacagcag

SEQ ID NO: 115666 - DNA, 469 bp, Physcomitrella patens
  Intron number 1 from transcript Pp1s335_77V6.2 (locus Pp1s 335_77V6) derived from phytozome v7.0 (chr-ID scaffold_335 ; pos 324850 to 325318)
ctctcttgtttgtggggtaaatccgaagcacaccgaggttgtgtttgctttgggcctgtgggaaaaagaagagttggagtgtttgttgaaaagattcttcttgcgagtcacgtagttttgtgccgcccagttaatggtggtgcttagccgtgtggaagtatctttgctctttttatttttgtttcttttattttattgtatttgttttttgtgtcgttttgagcttgtgtgaagtgtggttgccgcgggacgatgttcgataggaagtgaactggaaatggagggtaggggtgggtgggagtgtaaagtgatgcttgtttcttttgacgagagatgtttgtgtggtttaggacatgtattttctgttcctctttgcgctttagctgctattcatgtctgtggaatttctttcagcgtgcgctaacaactttaggggtttatttacaggcaagtagctagcgaaggaaga

SEQ ID NO: 115667 - DNA, 562 bp, Physcomitrella patens
  Intron number 3 from transcript Pp1s74_34V6.1 (locus Pp1s7 4_34V6) derived from phytozome v7.0 (chr-ID scaffold_74; p os 205394 to 205955 reverse strand)
atttgtaggaggactgtcgccctcagtagaatctggtaagacttaatcaactgacacaattccaagctagagcaatttaaaattgcgcttagtgtccgaaacctgaatccattgacgttaatgcaacattatttgatttattttttcttgtctttcacaattagccaattcagataattatgtttgtaggtaattacctcactctgcgttttagggtctgctcgtatgatcgatatgaatagtgacgttaccaatgtctgcttcttaatcttgaggcaccttatagtcaggtacaggtcttcaattgatcatccatacacacacgttgtccttttagaccaactggactagtgtcgtgcacaatttctgcaatatttcttctgctccagttatatctaaccaaggagatagtcttttggcttcgctgattgaagaccaatactgtgcagaagaaatatatagcgaggccttagtgttgccgaaagggcttattagtgcagaattagagtctgcgacggactcttcgagctatctcaatgtgcatttcaagctaactgtgcag

SEQ ID NO: 115668 - DNA, 817 bp, Physcomitrella patens
  Intron number 1 from transcript Pp1s215_61V6.1 (locus Pp1s 215_61V6) derived from phytozome v7.0 (chr-ID scaffold_215 ; pos 436455 to 437271)
gtccaagtccagtttggctctattccttgaaacaggtactgacgttttcaactgtgtattgcacgtgtgtttttttgaggcctttcatccctttatgaagagtgctgcttgtttaatgttattcgaagatcgacattgggacaatatcctgtaactattttaagtattccctgtgcgatactgtggcggaaagaatgctcgaattctagtgctgctcttttttgattctagaaggtcaatttgcattcgaaattgatgcttttggtgtccgtagagttcatgagacgttattttgaagaagcttatggtaagcgatcatcagtcaacgcagtcagcactcactagtgctgatccctcagtagcccctttcctctgtttgatgtgtttagggtaagattgttctacctctattgattttgacgtcggtatctggcatccatagagttgtggggtgtcaatattttatgtggtatggcgtcatggccttcacgagggtatctgcttagagatcatcgtgaccttagcggactcgagaaatagaacgatgacgaaagcaatactaaactgccatagagcctggcaatagttcattaaggttgctatgattgtgtcagcggttggggcctcccttttgttcgaatcaggagtagttgagccatatcacatgaaaaaagtctacagtaacacaaatctagaacaaagaataatgaattgcaacttttcagttccatttcaacgttgtgcatagctccgggtattcttcataattggttgttcaccccgaattgcagttgtggctgtggctttgacgtgggtt

SEQ ID NO: 115669 - DNA, 770 bp, Physcomitrella patens
  Intron number 1 from transcript Pp1s210_32V6.1 (locus Pp1s 210_32V6) derived from phytozome v7.0 (chr-ID scaffold_210 ; pos 152100 to 152869)
gtcgcattggaggtaaacatgtgctggatcaaaatttggctatcctgtgttgatctatttttctttcaaagtgaagttgagacattcttagggcaatttgaatcgattttttattttttattttttattttattttacttttttttgttttgttttgtttattttctaaagttagtaactgtgctccttcgttgtgtttgaggttgaagtatgagcttgaaggagagggacgttacatcgcttcgcatgttccttattaggtcaactcttgtctactccaccacctatataacatgtaaaacgttgtccaaaactctacatgcttccatgtttgtgtcgtgcatggtttccaatttaattgtttcatggattgttgaaacttggtttaggattgaatttgttttgggatggaattagaagatttgacaactttttggctcaatgaacatggattttgttttaaacctcttcatgattcttgtttttcattcattgctgcagtccctaaacttggtacattgtataatagaatcaaccaatctaatgacaggaacagagtgctggaacagagcgtgctgatccataggccgttgaggtattcaatttcttacgatttcttttgctctcaaccttgatcgcagcgtcatgtttgagagatgctttatacattacatcgaggtcttgtaggtattaatgtaataagtttttgtactcacgttgaactcgtttgtataggttacagatagaagttcaagcaagttcgagcatcg

SEQ ID NO: 115670 - DNA, 447 bp, Physcomitrella patens
  Intron number 2 from transcript Pp1s403_14V6.1 (locus Pp1s 403_14V6) derived from phytozome v7.0 (chr-ID scaffold_403 ; pos 116817 to 117263 reverse strand)
cttccggattcagaaaccatcccctttcactgcaggtgctctatgacatcagtttctcttttgttttgttttgttttgttttttttttttttgtttttttttgtttttgttttttttttgtcttttctccttcttcttcttttcttattcttcatctcttaatagatatctctttcctatggtattcgtccttattctgaagggtcctatcaaagtctcaataggaaatgttcggactatcattcaccttaacttcacggttttcgcggcaacacctaatgacaactagccctcgtctctactcagtgacatgttgagtatttcctaaatcccttcttaatgcttagttctctcgggtgcgcttgaatcacctaataacgctcagacattggctgtgatttcatgaatgcagaattgaagtgtgtagagacaaggaagaggcgcaga

SEQ ID NO: 115671 - DNA, 506 bp, Physcomitrella patens
  Intron number 2 from transcript Pp1s332_23V6.1 (locus Pp1s 332_23V6) derived from phytozome v7.0 (chr-ID scaffold_332 ; pos 75020 to 75525 reverse strand)
ctctgaatttagacaggtaaggtagaaatgtgctcttatttattttcgttttttctgacaattgccttccggcattatgttgcttctgaattagtcttggcgagtctctgtacttttcacttgaaagatagatgttaaagataatgaaccaaaattaaaatttctgtatttgtccacaaccagtcaaattcaccgctataaccacactcttcttctataatgcgcaatgtaacattacttttcttcttcaatattatgtgtgcggtggcttttcccttcgtgagtagcgcgtaatttccgtggtttatttatttgttttctttttcttgttaaatgatgtttttgtagttcgctgttttcattccgtgtgttaaaactctccctcaagtcaatttgcggggaggtcattgatgtacggtatgctggtgctttggtgcctatagacttgacaggaggaatattattgtcagcattgtactcaaatgtgcttcttttgtgcaggtccg

SEQ ID NO: 115672 - DNA, 801 bp, Physcomitrella patens
  Intron number 1 from transcript Pp1s158_84V6.1 (locus Pp1s 158_84V6) derived from phytozome v7.0 (chr-ID scaffold_158 ; pos 442146 to 442946 reverse strand)
cctcgaaggtgtgacgtcgtgattccgtgtctttgtttttgtttttttgtttttccttccgtttgacctagagaagaggttccagtgaggatgacttgccgaatatctcatctatgcaggggctcacctggtggtcactaggtgtgacctcatgactcgacagttttgggtgtatgagcttcggattacttgaagggtttggagggatattttgtgagcggtcgcttttgttcattccggtcgtttagttatcgatttgacgaatatcgtaggattcccgggtcgaaagggagctggtcaccatgtggagtagcccacgtggttgcatccttgaaaccttgatggttcgtatttgggtttatgaatttgatgctgaaaataaacccttaatctgtcttccattgccatgttgggtttgaattcttaccgacatgaggcgagtgacgtaagttcgacataagtagtcactgcgcgtcttagtacgttagagcattgtggattcctgcgatcctttgcagcacaattgttaggttaccgccagatatttgtcagtgtagtattggttgatagccactttgatgaaatattggggttggtgaaatgtttgggtttcgaggttctatgtgcatgaattttgtctgcaagagaagataagtcgatatctgttttgcatcgtgttggcatgtgtagttctttaccgctatagtttttagaatagtctgcattgaagtgtctggtcacgtttgcttaatcttacgcggtttcatttcacaggtgtccgagacagctagctttaaagat

SEQ ID NO: 115673 - DNA, 685 bp, Physcomitrella patens
  Intron number 2 from transcript Pp1s21_158V6.2 (locus Pp1s 21_158V6) derived from phytozome v7.0 (chr-ID scaffold_21; pos 1116727 to 1117411 reverse strand)
aggtaaatattttcacgttttgctgaatttcttgccctgccattgctctctggtcgagagctgcaggacacttctacctagcgattagcatctggatagaaacgtgctggcttgttatctcaactggggtggatccatgttgccaattcggtgtgcagctgaaccgaattcaactgctgctcgctgagtttctgtgaaggaagatagtatacacctgagtagattgtactggttccgttcgtcaagcaagaaaacaaccaatcttgagtagattgcggttaaacctaaaacaaaatttgccgggttttactgtagagaccaattatgaccttcatgtcaggatctaaattggatttcagttttggaaacttgcattgttataatcttagttttgatccctttcttaagaatatcgtatatttttccagtcacaagtgatatggagatacgtctatcattagcggttcgtagagtactgaatcttcttcacttaaatttacatctatgtttaattagtattagttttctagaatttcgtgttttcaagaatagaccatttgagtcgatttatggttttttttattgctgctgttcgtaatgcgaaatccaaatattggtttccttacggtacggattgttgatattgtttttctaagaatctttgtacctgaattgggaatgcaga

SEQ ID NO: 115674 - DNA, 961 bp, Physcomitrella patens
  Intron number 1 from transcript Pp1s35_172V6.1 (locus Pp1s 35_172V6) derived from phytozome v7.0 (chr-ID scaffold_35; pos 851029 to 851989 reverse strand)
cattggcttgaggtagtcttcttttttaatcccttttttgtttgaaaaataacacaagaactatacatcactgcctataagtttagcttaaagcaaaaaccaaacaaaaaaagatcaaaaaaattgaaattttataacttgagttgattcaagtgaacatggttgggaaataaagcaagcacgtctataacaaaagaaaccaataatagatatcttataatctaaatttaggaaaattaaagccatatccattactatctgtttgagccccagtttatagcaccacatttcttgaataattcatagacaagctcattccatcattcactacattcaaacacatatttttacaagaaaattaaaaaaataaaaaataaaaataaaaaaagggaaaagaaagagaagagactataatcccattaatgatccaataaaatataacctttgttgttgttgttgtcgttgtttttatgtgcgagctatttactacgaaacccacatgaccgtattcaataatcacatgagtttggtgcaaatacgcaacaaccctaaaaccacgcacattctcatgaccggcaggattgtattcaggaaatcgacgatcaaaaacaccattttattttggttttttggattttttcgtttgtttcgctccagcgacgagtggaaagcggagcttaggaactggtaaaagggcgcaagtcaaacacattctaccggaagctgcaacattcggcgtgttccaggagaccagataagatcatcagaagagcttcgcaactagctttttccctggcagcgtgtgtatttttgcattgctcgctgcctggattcgtgaaactagctgatgacgatcactattacttgagttgcttttgtttgtttgttagtttgtttttttgctattttacgttgtgtgcatgcagaaactgcgtgcgattggagtcgcgaggtgcttgag

SEQ ID NO: 115675 - DNA, 912 bp, Physcomitrella patens
  Intron number 1 from transcript Pp1s146_17V6.1 (locus Pp1s 146_17V6) derived from phytozome v7.0 (chr-ID scaffold_146 ; pos 247089 to 248000 reverse strand)
tgggaggcggtggtgcagtggtcgtgtagagtgcggtaatgtgttgatgttcgaatgtcgtgatgtggtgattttgtagtagctgttccttcaaagatgggttttgcgcttgtttctttggaacagcgggttcctcaggtttctcttgcgtcatacatgtgctgcttttattaatatctacttatcggaggtactcgtgcgtcgttagcgctgtccccgtgctggcgactgtaaactgttcgtctgtgccctggttttatttttcctttttctatcgctcccctgaagtgtgcaggcaatgtgttgattggagaacgggtgcctgccaatgttgggtgttgaactcggtttttggttgcgggtcacttcatgtgtttggatcgatgcatcctttcgtgaacttttttcccaccttcgattgcggagtgtgtcgtactgcaagcattagtagttggtcaatattgatagatttactgtcgcaactgtagtagcgattgtttccttgacaggccatcctggacgcagctttcgcggcctctggtatccctgtcgatatgtccgcatgcaatccttcgagtttgcggtctgaatctaaatagattgcatcctaaagcagttgatagtagtggcggcggtctatacttcttagcgctcattgtatgggacttactcttccgagaatcattgaaggatcgatacgaaagtagatgtacagcggatcatgccaagaatctacgagttttgctttgtgaaagcttttttctcacgactttttcagagaatcgaaattctggaagtgccatctgagtcgtaatgtatatcctaatcacgagccagttgagaatctatgctaatttaagataggtaatcaactgcgattgaagttctaaggtggttttttcttgcaggtca

SEQ ID NO: 115676 - DNA, 743 bp, Physcomitrella patens
  Intron number 2 from transcript Pp1s60_192V6.1 (locus Pp1s 60_192V6) derived from phytozome v7.0 (chr-ID scaffold_60; pos 1171126 to 1171868 reverse strand)
gtgcccttgggcttctaagaattctcatatacaaggtgctttgctctcataatctaaccagcattctttatcccgtggcttattttagggagtttcggtcgtatttattcacgatttttttcatcatgcaagaggtgaagtggagttgttaaggtaatgacaaggaacaggagttggtacatttacgaagtttttagttcttcgtgggatgtttcgccctgggctttccgagtctttgtttttgtgctttcgcgcgtgtgtgcgcaagggcttgaccagtacctggataggtggtcgttacgtagaataatctatcacgttagcgtgtagaaaattttcttaggcctttccatcttcttaaatggagtagtctagacagtgaataatgcttccaggttcggtcccaacgctggtaatgaccactgctttcggatgagagaatgtggaacccgttttctacattgacttgagcaaacttttgagtgggattatcatttatcaagtagtaactgaagttttctttgattgtagacttactcgacgagttcgtaattgcagttcaaccggtttgacgaattggggcagtctccaggaatgtagtttcttattaatagccctacattttttgggctggtttgtaatttgagacgtcaatgttagttcattggtgcgtatttttaaggttctgacaagtatctgagatttttgtttggatgaaggtgtacctcgacgggaccacaaca

SEQ ID NO: 115677 - DNA, 846 bp, Physcomitrella patens
  Intron number 1 from transcript Pp1s42_208V6.1 (locus Pp1s 42_208V6) derived from phytozome v7.0 (chr-ID scaffold_42; pos 1809032 to 1809877 reverse strand)
tcccagcaaggagacgccagtaacgccattcttgggtcagtggtctccttgaacgaaggacactgtttggggaggcgaatgtgtgggtttttcgtttgccggtctttttgatttaattggagctttctctaatttcctcaggctttttcgtactttgtgtcatcgaggcggtggtttttgggagcgatttggaaactgggtgaccgcattgtaacacagtgcgagacaacctgcgcctcgcgagcttgccctggcaattcaatttgagtccattttccttttttttcttttttcttctcccattatacttgtgcgctgagacgttcctctctcatgcgcatctctcctcttcttttttttcctttcttcttcttcttcttcttcttcttttttttttttttttttttttttgtttttttttgtctgatatgctcagcattattttcaggaggattataccatcaaattccacatcggagcaatggtctctcatagctgtcgtccaatttgccgagttattatattcgagggcacattctctctgcttgtggtcgtggttgcattgagaatgtttaatttgaacgagacttttctagcctgtccaacatcaactggcgtagtatgtggaatttacgcttgtatttagggttgattctggaagcgtctgtacagaaatctgctgctcctgaaatttacttaaatcttacgttttgagaggtgatcattatgtaacaactattctcttcactgtattctgttagatcaggtggctgataaacgaatgcattttacttttatgaatttgtggcagggacgtcggtaccctcattgtcgaccggagcactc

SEQ ID NO: 115678 - DNA, 484 bp, Physcomitrella patens
  Intron number 2 from transcript Pp1s140_66V6.1 (locus Pp1s 140_66V6) derived from phytozome v7.0 (chr-ID scaffold_140 ; pos 401933 to 402416 reverse strand)
accttaggccttcagcatattgctcgctcttgcaggtaatgactgtaacttggagctctaaaaataaacgaaaaagcttttcttttgaaccgtcaatcttggattgttttgatctagactggttgatatcccgattatgcacagagacatgtttgtcatcgcacgaagtagttggccctattatgtttctcaaaactccgagtatctgtgtgaagagttaatgacgtgttttattgaattatatcttttcacaatgaactgttttattgaattctttctcttcacttggataagcaggacatcacctgctggaccctgtgaggcgaagagaattgcaagataggatacaattcatttagttaaaatgacttcatctgcaagtgatgtcctgcttaaccaagtgattggtctttttagacctgacaggactcaactgattttgtgaacaggtctttgaaaacgctgtatttggaggaaagtgata

SEQ ID NO: 115679 - DNA, 579 bp, Physcomitrella patens
  Intron number 2 from transcript Pp1s51_53V6.1 (locus Pp1s5 1_53V6) derived from phytozome v7.0 (chr-ID scaffold_51; p os 365841 to 366419 reverse strand)
ccacaggtaagaatctcaaaaactttgacaaaggagatgaatgcaattgttaaaaccaaagaagtcgactgaagatcctacacacaatggtacaacgttagacaagccattaaagtagaatggagaatcatgctcctggcacgttaaaacctggtaaaaacaaagcaagcgacttttcctgcgaatcaggacaatcgaaaagggaattgataaatgttcgaggtcaagtaaaattcactttgcatgctccgtattctgcaaacactacagagagcctaaataaagcgttatgagacttttaatggtaaacacgaagttggatcaatgtgatgtggtgttcagagaagaaaaaactgtattacgaactgcagatgaggattttagcaattacgtgcaaacatcaaaaatcacgtaaaactaatacgatacaataaggattcaatggcacgaaacgaacggctcatctagaacttaacgtccgacatgccggatcactaacgtccgattgggggaggagatactgaatagtctctttctctccctcttttgctgatggctgcaggtagcagtggtagtgag

SEQ ID NO: 115680 - DNA, 838 bp, Physcomitrella patens
  Intron number 1 from transcript Pp1s21_141V6.3 (locus Pp1s 21_141V6) derived from phytozome v7.0 (chr-ID scaffold_21; pos 1064008 to 1064845 reverse strand)
gtcgcagcttgaagcaagaggagtttgattggcaggtaagttggggagatcgatgtttttttccttcttgggaactgggttttgctcgtttgcttcttcaggagatggctttcttctgtttgatgtcacaggtttggtgagtgccgagggagaaattttgctctctgtttggcattttttggtgttaacgtgaaagatttgggttcttgtcggtgagagacggggagctcgaattttttatgtccatgttgatggttgtattcgtgctctagaaaggtactgggagcttagtactattgggaagattaaccttcagaacgtagattgtatggtaggccgctgtgattagaactctcgcattttttgaagctctcagtttcctagcttgtgaaggtaggaaactgagagcttcttagtttctgtggtgtggcacgtgtggcttggtacatgtgtctcgacctcatgaacggagcttgttattacgatgttgtaggggttagaaccatcagggagttagtctaaacttcatgtctgtcattcaatttactgatgttgttagctctttggatcacagccttttcaaaatctgttattggtgtttagatcggatctgccactttgcggctctgcaaacatcgtgtatgcagtggtacctctgctctaaggttgaagtgagtaattagcagagtgggtttctagtagagaggtcttcacgctaagtttcaatttgggcatcaggatggactcaagggatggtatttgacggaggacctttggaaattggactcaaatcgtgtctggaagcctgttaattagttggttttcagcccaggtcgag

SEQ ID NO: 115681 - DNA, 330 bp, Physcomitrella patens
  Intron number 4 from transcript Pp1s150_112V6.1 (locus Pp1 s150_112V6) derived from phytozome v7.0 (chr-ID scaffold_1 50; pos 871806 to 872135)
agtgtgaagaagattcacgaggtaggaatcaagcagtaattgctgtatttgattcatgcacttcttccaaactatagatatcatttgttgctcacatctggtgcacagagcctcagaaacagaagcttctttctgcctcaatctttgaactctgcgacgaagtatcagttttcccctctcggtgaaatctcttctttgtctattttgaataactttcgtacgacattgtctttcacaacgcaatctcatgagtcgagaaagtttggtgattaaatcggtgccattcagtgtgcagattggaatactggcagcactaattgcagcaactgc

SEQ ID NO: 115682 - DNA, 986 bp, Physcomitrella patens
  Intron number 1 from transcript Pp1s138_29V6.1 (locus Pp1s 138_29V6) derived from phytozome v7.0 (chr-ID scaffold_138 ; pos 139580 to 140565)
acacaccgaatacctcttgcagtgctttcttcaaggtgatatcttctgctacatttgatcattttgaagcaagttaattagttctcgatttccttaaccagctgtttgttaaaatttcacagtggtagcctcattacgttcttgagagaaattgctcgataatgaaggccatgcttcgtagtcggaagattctgtggcaagacgcaacactattggcttgtgtgtctcctatctgtgcgcacggtgctttggacgcccactagcagtatacatatattggtcattacctcggcagacacagacgcaaacaagcttcagggtgttatccagtgttgtcatccgcttcctgttgcattcctaatttgtgcttgactatttcattttgttgcactcccctgcgattgtttttttcttcagaagtagcagagctagatctctcagagttttcacataagattatggatcacttattagttccatgcaacctcgagtcatgcacgtttttggtatgaaatgaaccgagacactgaaattaattggtaccagaaccaccaatgcatgagtgcacttaaatgcaatacgtgatcgacgctttgaaaaatcggtctctatgttgacgaatccgtacttcgtaagcactgctaacaccaactgaactaatggaagcaaagcattagggtgagaattgatttgcgtggactcgacgccacttaattatcagtaatttatcatgactacatgcatcttttgtagttcattaagaaaatttctaaaatagcatccctgcctcactgtgttgtatcttagcgttacaccttcttaaaccgatttgtgcttatagcaatacgatttggcttaaacgattcagcatatgtctacttcgatttatcttattccttgcaacgaagatgagttcacacaagtcgtcaaattcttggtgcttccaatttaaatgctgcaggtcccaagagcaggcgaggctttca

SEQ ID NO: 115683 - DNA, 417 bp, Physcomitrella patens
  Intron number 2 from transcript Pp1s49_11V6.1 (locus Pp1s4 9_11V6) derived from phytozome v7.0 (chr-ID scaffold_49; p os 100657 to 101073)
acgagataccaaaatcctgtaagcactaacgaacacgattggattttaagttacacccttagaataaagttggattattcatgtataatttttatacaagtcggagcagtgctataccagtcatgaaacatgaatcagctatcatggcattacatttcaatttttgtctttctcctttttcttcccttaaatagattatcaagaattcacgtattgtttattgcgcggcttctctgtatgatctttcgagattacacaagtaccctgcataatttttcttgtcagtcgatgttgatgtttttcctcgctaattttatactgaagataaaacaaaatatggtgatgtaaagccgaacatgtggagagtgtttgacgaatcctgacactttgagttgatatcttgaccagcaagaacca

SEQ ID NO: 115684 - DNA, 574 bp, Physcomitrella patens
  Intron number 2 from transcript Pp1s162_57V6.1 (locus Pp1s 162_57V6) derived from phytozome v7.0 (chr-ID scaffold_162 ; pos 278065 to 278638 reverse strand)
caatttggatcacctaacttactttggaggaggaggtgcaattcccaaaactcaatttttggattgtagctattttcttttgtgttgacaaagtctcttaaactttgattgtagatattagagtatggatgagatcgtagacattctttaatgaaaattgtgttgcagcactttgttttttttaattttattcctttttctaatttgaattttgaattgtataaaaataacacgttatttttatttatgatatgtcaagatattttaatttgagattgatagctagtagattgatgaattgtagttttggttaagaagagtatggtagattttgcttagttttttaataaaaagaataattaagtgatatttgttaagtgaaatataatgtcttaagattaatggaagagaattgttgatacttgaattatttatctccctttccatcatatagcttttataatagttacaagtttgtggatcaaataaaaaaaacattgtatgtcataagtattttgaattttataagaaccaagctaactcaagagcaattgtgtgatgtctatgtagggta

SEQ ID NO: 115685 - DNA, 989 bp, Physcomitrella patens
  Intron number 1 from transcript Pp1s46_247V6.1 (locus Pp1s 46_247V6) derived from phytozome v7.0 (chr-ID scaffold_46; pos 1718448 to 1719436)
ctttcctgctacttctctcgcagacaatctcgacagtgagttctttttgtgccctgtaactgctcgcacttgttaagtatgcttggtgctgcgtattgtgcggtagttgtaatggaagcagagcgatagtgtaatgcctcatggtaccccgagatggcataactgggaagttggattatgtagtgatttttatttatatccaagggtttcgcacttgggttccgccgttacgcctttctttacctttgttccgccaatgtagctctgtttcatctaattgctgctgctaccgtcgcaagcacactatcagtgagtgcaatcatttttaccctgctctgttcgaattagggtatcggacatgatgtctggatgttgagctctttcaggcaccgttatacgtttatccatcgaagaatggtcgtgcgcaattgctgcagtacctcctagtttcttgcaatagctgaaacggaggattgtagggtttcaaggggtctaccagatgattgctagactctgtctaattgttgaatcaactcctagctaatgcatatgactagtgatatttgcttcatcggatgctgtctgagtatatctgtcactagtaggccataatttaaggaaaaatttgatccacgtttcaacgccaactgtctatttttcggaggcttgtagttggtgattgggaagagcttgggtggtcagtacttttggaacggagccaattttttttttttttatatctgtgcttagttcaggatgtccaaaatgtgatgttctttggaggtagtgggtgctgattggcattacatttgacagctagctaccgatcagccagtcactgtttagacgggcatttctagctgtacaccctcatcaagtagttgtggtgttttttctacatttctgtggcattttatttgtagatatgtgaatttcatatgctggtgcgaatcaaaattttgcagagaagctattggtgatattgcggg

SEQ ID NO: 115686 - DNA, 432 bp, Physcomitrella patens
  Intron number 3 from transcript Pp1s53_256V6.1 (locus Pp1s 53_256V6) derived from phytozome v7.0 (chr-ID scaffold_53; pos 1796994 to 1797425)
agcttccacttgcacaaggtactttcattaacctcttcacattctcgtgttgccctcatcacatgatagacagtaatcctgaatactagccgctatattagctttatgtcaggataggcgtcactgacaattgaagctgtaatgtcagtggattgtatggtcgttttgtttttaattgcagacagtttgttccacaataagtctgctagtttcgtacaggaagttcattataatttcgtattctgtcttactgtaatcttagagcggacaactcgacttaacatctatcctttatatcctcttttttttccctctggtttttgaattcattttagttttttgaaatatttttaagttctcaatgcatgaaatttcatttgaataattttctttacagtttccattgttgtcgaggagcggacgactgaaccg

SEQ ID NO: 115687 - DNA, 919 bp, Physcomitrella patens
  Intron number 1 from transcript Pp1s28_309V6.1 (locus Pp1s 28_309V6) derived from phytozome v7.0 (chr-ID scaffold_28; pos 1960609 to 1961527)
cccttggcgacgtacctctctctcacactcacaaggtactgcagatccagtgccacaactggactattgattcctgcggtacagtacgagatagtaccagtacctacattctcgtgcacacttgttgttgttgtttttgttttgttttgttttgttttttttttctgatggtaaatggtgcattctagaaccggaactgggcggacacacagtacagtacaggtagatacagccaccagaaacgtcaagtaacaagcctgcaatgacgggactgtgggttcgcttctcggcgaatgagcggggtctattctagtaagactggtgagcatttaccaggggctctggtatctagtctgagtaatgcaccgttcagagaggacagtacacttcgcgggtttgtctagatttttatttatttatttatttatttattttttaattttttgaaatttatttatttatttatttaaaacccttttctttcgctgcgattaaggtcagtctctctgtccactcccagggttgttgggacgctgaaacttcactatgggatcgctcaaaacccatgcagttgtgttcctggtcgtgctggggtactgacatacattatcgcgtccatcgtgccaagctacactgtcccagcatgactcgatgaggaagtgggcattgcctgcacaagcatgcttgccttgaatcggaatcaggaaacgaaatcagtcactgacaacgaggttggcggttgcaaacaaagtcaaacgtaacagagaatattcagacattattttgaaaattgaaaatgaactaatgaaaagataagtagatgcaattagtttgggagtgggattcgcaatcagaacttgatctgaagattgtatgagtgcactgttaaaggcacaggagatttttccagttacaagat

SEQ ID NO: 115688 - DNA, 501 bp, Physcomitrella patens
  Intron number 1 from transcript Pp1s409_14V6.1 (locus Pp1s 409_14V6) derived from phytozome v7.0 (chr-ID scaffold_409 ; pos 75866 to 76366)
caaacaggtagtgagacccttctgtctagattctgtatcggatctcgtgaatttgtgggcctgggtgcttcctctattttgtcttctttcaaggactgtcccaccctagagtagctttgtggaggcagagtgaaatttgcattgttttttgcttttgcgacaaggggaattttgatttgtgatgaggccctgttttctttttcgattgttttctggagtgaaatgtgggtcttaaattgtagtagaggatttcggtactgggtgtgcgtttttatgttggtgtcttgtcatgattccatttatatagatagttctgtgaagatgtgttagtttgttcgttggcgtacatttcatagtacattatggtttcgattttttttctggatttaaacaattcctatctattctcttactttttttttttaaatctatgaagttttggaaaagcaaacttgaggacgtttttccgagtttttggatgttgaatttgatgtgcaggca

SEQ ID NO: 115689 - DNA, 382 bp, Physcomitrella patens
  Intron number 3 from transcript Pp1s26_47V6.1 (locus Pp1s2 6_47V6) derived from phytozome v7.0 (chr-ID scaffold_26; p os 393235 to 393616)
ctggcaagcagagggctgcctcggtttttttcttggtaagtgtcacatatcccttttttgattgatcaactttttctagtaaaaaatcagagcaacacaatgaggattttcacatccaaaaaaaccctcgaaccttataatcagatttgaattattcattcttctgtttccgtggagacccgtgaataacacgatgccattaacggatgcttccgagacaagacaattcttgtgggttttcgtcttaccaaattcataaaacatatccttacagttctgaagtctcattttaagggctgttatttgcggtgaaagctaatccatgacattgtatcttacgctgccaggttggcctgccatatttgaaatacaaactcgaggc

SEQ ID NO: 115690 - DNA, 517 bp, Physcomitrella patens
  Intron number 2 from transcript Pp1s50_191V6.1 (locus Pp1s 50_191V6) derived from phytozome v7.0 (chr-ID scaffold_50; pos 1902405 to 1902921 reverse strand)
attttctgttgctttcacggtgcgtgttgctaggatctttgaccatgcaattgccttggtagtcgactctcgttgcttgccacatgtatgaacgttagcagctgtgagtcaagttattttttatggcagttgatgggttgtgggaaaaacccgtcggaactatgtcttcaacagtgattgcacttctatgaatgttctacttgcacctggaaatcagttgtaaggtgatagagtacttgttcggaactcagtggtaaaataccagtagttaagatgtatcttaatcaaaagcttttgttgcttgcagtcctttgtggatcccctgacagtaaatctgcggattgcgatgcttttcagtttgataaggctctcatgtaggtttctgagactttcgggttcgcagcgacatacatcgatgatgactagagcaaaggtaggatggaaatggattattctgtaatgagattaattggttttctcttgtctcaatctgtgcagagaaatattgcgactggac

SEQ ID NO: 115691 - DNA, 666 bp, Physcomitrella patens
  Intron number 1 from transcript Pp1s24_151V6.1 (locus Pp1s 24_151V6) derived from phytozome v7.0 (chr-ID scaffold_24; pos 1549291 to 1549956 reverse strand)
tttccgaggtgtcatttgatacaccaacttatagggtaagtttttattgataggcaagaccttgctagccttggacgtcatttgcttttcttgacgtttcaacttgagcctgatggaattttactttgaagaaatattatttgcatcatgctgtcgcaaatgtgattattgtatctttctgttttgcttttcatacatgcgtttcgagataaagcataaatgccgtctcaaggcaccttttgaagaaggaatgtccacaaaccaaccaacacattagggcagtgtcgttagtgtgcatggttctaaaatgaatctacggtgttggacatggtgacttcctgtctcttttggggtttccatcaatctctgtggaaccgctaagaaatattcacactacagaactgattttattaagttgttggattctggtgttttgaatcgcattctcacgtcccaaaaccttaaactatttcaggatcagtgtcctcttcttttttcattcaggaagtcacgcttgtgacttcccagatctgcaaaaatcgcgtgcgtggtgtcttatgctgaggctacttcgtaaggaagatagttttattttctaaaagtgcctacattctgtttgcatgcacatcagtttcagattcctaacttgcgagttggaacgttgaa

SEQ ID NO: 115692 - DNA, 590 bp, Physcomitrella patens
  Intron number 1 from transcript Pp1s6_293V6.1 (locus Pp1s6 _293V6) derived from phytozome v7.0 (chr-ID scaffold_6; po s 2456802 to 2457391)
accctggattcctgcggcggaggtaagagatctgtgaaatcttgtctttttgaccttgttcgtgacttcgacaagaccattaaataaactgatgccgcacgcagcaactccccgaagctggttacctaaagcacccaatagcagcacggtgccttcaagttctccattcaagcaatctaccaaatgctattgatagcagttattcataaccattgtagattgatttgcggtcgtgatcgtgtcggttactatgctctggaccgttaaacagtggttcccccacgaggtttgcagcagaaaaggtcggtgtccgtccattaaatactcacaggactcctggctaccattgtggtcagaatgtcggactggtgacggtgaagtcatgctgctctggtgactaatatgtttggacaccttagaacaaaatcacagtaaaaagtaaaaagcaacagttatgctctattctgcgatgaatgagctctagataagcactgagagatcttgtacagttcttcaaacaaagtgcacttcaatatacttgaaatctagacatgtatcctaccaatgtttgatactgttggaggcagcag

SEQ ID NO: 115693 - DNA, 539 bp, Physcomitrella patens
  Intron number 1 from transcript Pp1s82_99V6.1 (locus Pp1s8 2_99V6) derived from phytozome v7.0 (chr-ID scaffold_82; p os 1024544 to 1025082 reverse strand)
tggtccagcagctctttgggaagcttctggcactcgtaagaatcctcttgcccttttcttccagaaacccaacattgtagtggagaattcctaaaaatttagctccctacctggttttgaaaaggctctctgaagtacttgattcggattcgatcctcaggacaaccttggatgaaactccctgacatctccattaacataattctatttgatttcaccaatttttctgggatagtcccaggttcaactttccacatcaaatgatgatctgtggcgaatctttgtaaaaattcacattttgagttccgcaaacttcaagtctgccatagagccacgattagctggttgaaatgtagccattactctcaagtctagctgttggtagcttgcagcaaaaagtgagccttactcaaagcggttcatctttatgttttatcaactgtactagtttgtcccttgagatgaatcaggtaatttgttcatatttcatttttgcttttgcaggtttcatcccattagccgctgcagagagcccacac

SEQ ID NO: 115694 - DNA, 650 bp, Physcomitrella patens
  Intron number 1 from transcript Pp1s35_50V6.1 (locus Pp1s3 5_50V6) derived from phytozome v7.0 (chr-ID scaffold_35; p os 229777 to 230426)
accggtgcgcctatctttcaatcctgtatctgctctaactgcgcattacatgcaatttttgttgttcttcattccgaattctttcttttatacaattataggtcaatcaggtgacgtgatcgttcttattacgtagatctgttgagtggtctggtggctgctttagtttcatcgtttgtctcatggttggggagcgcgttttaggttgtgttggcatgactcgaatggtttgattcttgcactctcagagtttctgcttcgaaatttcgattctgcttgtttgtaggttccctctgtgtttcattcatggattaattgcggtttcgctagcatgtagattttgttgcataataatcttggcagtaattatcgtgcgactttcaatccggtagataggttttgccttagatctagcgtgtatgagagattatcttgttatcggtaagacgcgactttggttcaaaccttagggtttagggtttatttatttatttatttttccgtttagtgtacaaaacaatggctgagaattcaatatactgcggatgaggattattcagcgtctacatgagtagaattgcttggatttgacgtaaagctggtggtgctcctcagggacacaaacgcagctttgaaaagcttgcagcaag

SEQ ID NO: 115695 - DNA, 1018 bp, Physcomitrella patens
  Intron number 1 from transcript Pp1s9_336V6.1 (locus Pp1s9 _336V6) derived from phytozome v7.0 (chr-ID scaffold_9; po s 2353476 to 2354493 reverse strand)
caggtaggtagtacgagtcgcttctgttataattatgagcaatgtttcccctgtagttaggatcgagatcgaggcttcaaattgtctagtatgcatgagcaagatgctagggcgtgacaaaattctcaaggtagccttgttgagttaatgttttatttcgaagacatggaattaaattttggagccagctatttgaatctctcttcgagtactttaagagattcaactttttaaccatcgtgttgtgtacacttttttctgccaggatttgttttaaaaaagagcgacgtctttgctttacaaccaatgtggtcgagtcacaacatttgtctaaaacgcatctatgtgagttccgcgtcccgagatttattatgcctggtgttcttcccttattctcgagagcttcttcatgcatgcaggaagcgacctaaataagaattgccttcttctctaacaaaccattcttcttgtccttctttttgacttatatctttttcatttttatagtgtgacgttgtaaccaagaatctgcggaagcaattcaacgtttcactgcctcgtggagctttgtgatttcgataagcagttgaattatttgaaagtgattgctcagtctcctagggactaagattgttaagctcttggtcacgtcctctattgcttgctgcacatacaggaaatccttctcataagatttgaatccatcataatacgcgggtggatcacggaaaagcacttctcaatgacacagtttgtaaacatgacgaggacttttgcatggatatggattcaaatttttgactcattgaatagttaagatatcaagatcaccaggtttcttgggtttcattcgttctgtcctgtaagttgagcttatatgggggccgatcttagctggcaggtcagtcgacctgctttcccgatcaatcagaggagaatttcgttctcctgctgcatgactttggtgatatttgttgtcgaggcgaggtgatatgcagggagaactctgtacgcagca

SEQ ID NO: 115696 - DNA, 881 bp, Physcomitrella patens
  Intron number 1 from transcript Pp1s24_210V6.1 (locus Pp1s 24_210V6) derived from phytozome v7.0 (chr-ID scaffold_24; pos 2027183 to 2028063 reverse strand)
acccatcctcctcccatcagcagtcgcttgctaaggtaggtagcagtccatacccacgctgcctctcaccattaggtttctggctacggtttgcttttctctgaggaggttgaagtgcgttcacggccccggacctggtgcatccagctcttggcatcgccgtcactcctgttctcgggcctcgatctgaactgccaaaagttgaagtttcattaccgctttctgccccgcgcatttgctaggtgtgggtatctgggttttcggtgcgttttcctagctctggtgtgttgggtttgctctttgtatgtttctagagttttctaaagttctgagtgggtttgttttgtttgttttgttttttgattttttgggttttttgcttgcaatgctttttttttgttttttttttattggttgttttttcgggggtggtgtcgtgatttttgaaggccaatctctcgatggcgtgtatagttttcttgtagttataacgaacattgtagcgcttagggtttattaggggccctgaaatcggggttaatcgccgtatttggggattcgggttgtaggtttggtgagcgacatgcttcactggtaatcttcacgcttcgcattgttaaagcgattcatttagcgaaaaattgcacaactagtttcattgtctagtcttttgttgcgtatgactgttctacattgatatctatgatgattcaagctggttgtacatttcatagtgagagatgcgtattaagtattgtaaatcaatctccgagttgttcaatctggtcgaggtttatctatttggtgaatcaagctcaagggttactctctgttctgtggaggcagatcgctctagcagggaggaattaattttcaacttg

SEQ ID NO: 115697 - DNA, 849 bp, Physcomitrella patens
  Intron number 2 from transcript Pp1s80_110V6.1 (locus Pp1s 80_110V6) derived from phytozome v7.0 (chr-ID scaffold_80; pos 760971 to 761819)
tccccagcacgtatcttgtggaggaccatccgcgggtaagtgtctccttgcagatggaatcgcttgcacgaacatttatttgcaccttgatggttagtttatcgatggtacatgacctattagggttttgtgtaatcagaatattcattagggttttctatgtgagagtccattccatgatcagaactcttggcaatgccgtttttttttttttttttttttttttttttttttttttttttttttttttacggcttacgtatatctgtagagcaaacgaccgaggtcttgctcgaggttttgaattcgaataatatcggttggaaagtgaagtgttaatgattcttcataattaacgaacaatgttgaaatctatgagtgtctggttagacctcacgtctggcttgataattcgtggcacttgtttgtgtcgcaatcgagtggataaccactcgagctagtctcatgaatcgataagttttatagtagctgtagtacgtcacgtcgaaatgttcgcaatattggcaaggactagcagtcgatagcctcgaccttgtcagtttcccttcgctgatcggtttctttctccgccccccccccccccagctgaaatgtccctggtcctaatttgtagctgtgcatttggcacctggtcagttacagtgctagatatcctgttccagggctacgtgccactgcggtctccactccaaatggatttactaaagaagttgaatatcgtgttttgagtattagtttcctgatttagagtaagaggcagaacaatctatctttattttcataccaaagataccttcgggttctgatcaactccgaccatgttgcagt

SEQ ID NO: 115698 - DNA, 998 bp, Physcomitrella patens
  Intron number 1 from transcript Pp1s60_158V6.1 (locus Pp1s 60_158V6) derived from phytozome v7.0 (chr-ID scaffold_60; pos 982168 to 983165)
tcagcaaggttcttaaagttaaggaccgtctctctgtgagtttcggaacgcgccttccatttgtttgtttgtttatttttttttgttttgtttttgttttgttttgttttgtttttttttttttcttttgaatacgtaagctgtacacaccgacatgcatgtggaccggagcaatgcacgggcgcgtatcgcacgccgttcttgttctccgcctttctcgcatgctgcctgtgtgcttcttcgctctcgcagctacgtgtgatagttgcagtgtacaattggtttgtttctcgcccacctctgcggacttggttgttgggaggtgtggaggcagaccacgaagttgtgctgaaataggacaacaacggttacacccccaagtgttctttgaaaataagccattcagttttgcacgatcccttaatcctcttcgaattgtagtatgagatgctatttaaactggatcgcgagactgctcattcactgggattatttgttctagacagtcatgaagctgagagttgcatacattcagtagtcagagaagtgtaggtctgtgtacagaagtgggtctgcgaggtgacattcatgatcttttagataatatttcgaatgcaaaagcggaaattgactacgagctgaaattacgtactctggcataccaaattggtgaattaaattgttttatcggtgcattgtgcggtcagattgattctgccacttaaggtcgcatgtgagttacacgaaaggaattgtaatgcggaggaaattatgtggaggaataaatcgatggaattttcgtctgggaaaagagacagatactttagatgtatggtctacgcgtgccttaaaataatcctggggttatataaccaactcgcattagcgtcttggctttcagaccgctagagaaacctttctacaagtctcccagtagacgaatgtgctttatctagctgtgatgctgatattatacttccgcagagtgcacgagagga

SEQ ID NO: 115699 - DNA, 920 bp, Physcomitrella patens
  Intron number 1 from transcript Pp1s28_196V6.1 (locus Pp1s 28_196V6) derived from phytozome v7.0 (chr-ID scaffold_28; pos 1061188 to 1062107)
cactcccacccccgggtcctcaacagctttccaaggtgcgtgtgctgtgtgctaatgccttcgtactcgtggagtcgctactgctccgcctttttttttttttttttttttttttttttttcttttgttattattattattattattattttttcgtcaggagttgggagttctggggtttggaaggttgttccattttagggtttgtgtgggcatgggtaagtctgggggttgggtggatattgagtcttgaattgttgtttttgaagacttgaagctctggtgttttttttgtgatgcctagaggagcgtaatggcgctgtcaatttttcattctgtttctgtgaaggcttttttttttttttttttgtatgaaaggtgcagattatacccacggggatttcagtgagtagaagaattgtggaattcgtcttcgggtgtatccctgcgttttggaattggtagtggagctgctatgggtcgtaattctgtcaccgtttctttatagatttgtctggtttattatatatatatatatatatatatatatatatatatatatatatatatacggggtttacgagggatcttattttcctgagtgaatcgatttggtttttgtcgattgagctacgaactttctgtgtgcttcgacttctaggtggaaatctccttgcatctttggggcagtcctttaatcgttcattcactgctgcaatgttaaactgcaacgagcgcgtttttatgggggtttctccgttcaagacactcagcacgttcggaagccaggatatagcatgcgatgaacctatgtctacttagaagcgtttgacgtcgatttggaggaaactcattaagaatactcgtgatcaaagtattaattcatgatgtggaattactgtgaacgaatggcatatcag

SEQ ID NO: 115700 - DNA, 515 bp, Physcomitrella patens
  Intron number 2 from transcript Pp1s94_18V6.1 (locus Pp1s9 4_18V6) derived from phytozome v7.0 (chr-ID scaffold_94; p os 122014 to 122528)
agatcgacgaagcaagtacgtataattttcacctgttcgtccttgtaaacggtttctcagacgttgttttgaagtcctccactgaacaatgtggatgtcttagcctgattgggctccgagttagctgatttggtagcattccggcaaattgcaagtactttgttctgttgagagcaaggtttcaaatacgatcattagaagcgcaatgacgtattcattctcccaccccttgattgtggatcaaagtccctatttttcctttaaccagctcacttctcgcttgaggttctgcctcgggttccttcattgtattatgcattgctctgtaatctgtaggggttgatgtaatttggtaagaacattaacttctttgtggaattgagggtaaacaacggaatcattttgagttaaaaaacgcttagttctggaattctcttcagaggatgacttaggtttgatgttacgcgggcgttctgtgggacagatcaggagcagttactggctaaccaagacaa

SEQ ID NO: 115701 - DNA, 762 bp, Physcomitrella patens
  Intron number 1 from transcript Pp1s12_74V6.2 (locus Pp1s1 2_74V6) derived from phytozome v7.0 (chr-ID scaffold_12; p os 427754 to 428515 reverse strand)
tgctctctttcttaacctctcccgcaatctgtcaggtgaattccttcccatctcctcctctctgcattcatgctctcgcttgtattggcttccgcaattccagcccttaaatctcttctccgtactacgtaattctctcgaatttatcacaatgttttctgttggtctagttcactgggtaactaattacagtttcgtgatcctccacattgaatcagggagatttgcttcactgtcttatgagtttgacttgtgagctgatcagtgacgtaattgttgcacatcagaaactgtcgtacttgtctaatagtattgcctaagctatgaagaccttggatcagttttgaattcattttgtacgattgtaagctggtttagtttttgactgtgaatcgaatcggtgtagtttttgcgacaacctaattaattgacataaggaaacctaactttttctcgaaatcgaacaccttggaatggcctcttcgacgttttctagacggttgggctgaaggattgttaagagtactccattactttcaattgtacgcgagtaaacactgtaggctaagtatgcgtttattgatgttcctggattcaactgttgatttccgttgggattttttcctgttggttttcggataagattgacattaacttgatggttgaggaattcctgtttttatacatcttttcgcaataacgtgactggttttctgggtgcctgcaggagaaacactcaacaaggacgcagcagaagtagtt

SEQ ID NO: 115702 - DNA, 816 bp, Physcomitrella patens
  Intron number 3 from transcript Pp1s145_21V6.1 (locus Pp1s 145_21V6) derived from phytozome v7.0 (chr-ID scaffold_145 ; pos 114447 to 115262 reverse strand)
ctccagattcaaccgttaccaaagcatcgaaggtctttcctctcacctgatcttcgaaacataatgacatgatcgcgaggtgcattagagttcgcagagatatttcttaaaaacaaagtgaatgttcatgttttgttacattcccacggagtgagaaaactatagtgtcaggtggaaaacttctgttacatgttgaggtaaggttactggtttatttgaattgttgttttcttatcgatatgaatttactccaagttcttttagtgttaagtaaattaaacatctatccaatttcaaaatatcatgaggaaaagattgcttcttgccccacaatactcaagcatatcaaatttagaaagatgtcgcaagtgaacatccgatgttttgatacctttacatcacagtctgtatgaaagtggacttacactttctccaataataaagatatcatcaaataattgagatcattattgttcctcaagctgagtgaaaaggttatcacagaatggaatcacaaactcaatctcattcaaaaggaatgacgttgcttaactactacaaaggtttcatctttcggttcttttcttttttctggctatttttttactattcttttaccaattcttatgctcatctatatttgtagaatatttagaaagcatgcttttcattcatgtctgtttgacggttgtacgagtaattaattggagtatgtctcatcattcgaatttttttattgatctcttagatggtgttctcagcgtcgtaatattgtgtcgtttgtacagcactacggtggggctccgctactcccat

SEQ ID NO: 115703 - DNA, 498 bp, Physcomitrella patens
  Intron number 1 from transcript Pp1s121_71V6.1 (locus Pp1s 121_71V6) derived from phytozome v7.0 (chr-ID scaffold_121 ; pos 495510 to 496007)
aggagccatctatttgggattcacgtaatacaaaggtacgatgcatgcgctcattgcccgtggttcacattctgtatcgcaaaacttgattctcggttcaatctgatctgctgtgttaactttatagattatacgtaatacattttaaggtggtttattattattttaattatgtttttaccggttgtacggtcgctttctaaattttgcgcttatttcctgatttctttgcttatattctgtgttgatctgggaatgatatgaatttgtgtatttactttggtggtcatttttcactttttgtcagctaggaattctctactgttaagaacaatattgttattgctcagatttgattggattattttcattttctaactcttgtcttttcttgtctttctcttctttctatattatctctcaaacactaactatttttgagctttctgtttgagtcaatgtgctgctctatttcagtttgctttggggattcggaag

SEQ ID NO: 115704 - DNA, 830 bp, Physcomitrella patens
  Intron number 1 from transcript Pp1s33_19V6.1 (locus Pp1s3 3_19V6) derived from phytozome v7.0 (chr-ID scaffold_33; p os 166620 to 167449 reverse strand)
gaacgcaaggctctcagttgacaaagcaaggaccggtagggttccggagagcttcccctgtttcgtcgtcgaggtttttgattgcgcttctcgctcttgtgcaatctctggcgttgctgctctctctctctctctctctctctctctcgctctgcagatttccatctctcagacaccgattctgctctacgtatgtaccgctgtcagttttcgattccacttcatctgcccagctgatcttttcatactgcgtgttgattaccccgattattgaggtgttgttttctttccggatgtggaggatcgttcttgcccctgagcaatttgaagtggacgctcgtcgttactttgtccatgttcctccatggttagaatttacgtatgatttctacccagaggtcatgaaagcattaattggattgcatctgtgacttgaaataggtttgcggtggcttcagctgttacttttttgttcgtcttcttctggttttgctgccgtgtgatctagcgaatacatgatctagtgaacttcgtaatgctagatgtcccgattcgtggttttgttgattaagtggatttcagtgtggtgaattttagtagcttcgatggtatatagaattggttcttgataaccgtgcagcgtctcacatgatggatgactgcttggttagtccccggattttttgttttgttttttcctgtttcgacagtttgctttttctcgttttggatcggttctgtgaacgttgaagagcgggtcatcaggattttcatttaggtcattttgtggggtagaaaactgtggtgcaggaagtaccagttgcagatcg

SEQ ID NO: 115705 - DNA, 957 bp, Physcomitrella patens
  Intron number 2 from transcript Pp1s38_54V6.1 (locus Pp1s3 8_54V6) derived from phytozome v7.0 (chr-ID scaffold_38; p os 240428 to 241384 reverse strand)
cttttccaacactcaccgaagaggttagtaactaatcatgtcatgctccttcacattcaaacccttgagattgagctctgctaatgcgaaaatagcatgtacggatcatatgtttggcaattgcagctcttgtcgcgaacttttctctgttccctaaaaattacttgtagctattggcggtatatctgtcgtgctccgagtgatagaatggacctttgaaaaatttgaggcaaaactgtcagcgtccgtactgttttttttgtgtgtttttttttttcattaccatcctccgcgatgatgtggctgggatccatatgttcgggtaatcgatacgaaaagagtttacaatgcttagattgtttgtagtattgactgacgagatctatgattgattcattttgaaagtggtatctcatagttaggatttgttggatacttcttaacgatgatgaattgtaaggatattttagtattctttttgcgattctgaagttctagacgagtcggatgcttttccatctagctcatagtacgtgattttatttgcacttttcacaattgtctcactgtagtattcaaatttgatttaatactcgcccattgtacgtgaatttgtgatttggattaccactgatgacaaaacagaaagctcagtatacgtgctgggcttttaatgccatttggattagggtgtcctgcaccgcttgttggtaccgcatcataacgtagtttaagcaatttaagttaaagaaatctatcgttcagagatgtttttcttccatcaatgaaactcaaggtgtctgagttactcctgttggttttgaaattttcccatgcctgttttcctactctgtgtatttctccaagccgaaggaggatgtctatactttcaaaaagtttgacaaattgtttcatctggcaggaagttataggaaagacggacgaagagatttatca

SEQ ID NO: 115706 - DNA, 643 bp, Physcomitrella patens
  Intron number 2 from transcript Pp1s3495_1V6.1 (locus Pp1s 3495_1V6) derived from phytozome v7.0 (chr-ID scaffold_349 5; pos 523 to 1165)
tccgttattgcccacgtcgatcacggtacgtgcttcgtgcttccttgtgaggtttgtgcaccgttttcgttcgaaatcattctggtttatagatttgttgcgtttcaagatagaattgacctaaatttcatcattcccttgtaaatcttgacactgtgcttcaagtaaactgacttgatttaaaatctctctctctcgggccaaacaatggacacatctagcatcctcatcctgacatattgcctcgaagataggtctttcaacttcagtgaaacttaagtccgtgtggtagtaagtgatcaatacccgcggctgatctgtgttcgctcgcgcacccctgttcactgtaccggagtccagatttcgaacacaaaacccatagtagacgaggaatttgaagaggaaaccaaaatagcggcaactaacgaaatcaaacaatacgatgaggatacaacttgaatgttccatagcctaacgatttgaccagaattgtcccactattttcttattaactcagctctttcctcgaccatcccgacgattactatgaactggacacatttcttccgagccgggattaatgggggtgagtggtggaaatgtggcagggaagtcgacactgacggattcgctggtggctgct

SEQ ID NO: 115707 - DNA, 729 bp, Physcomitrella patens
  Intron number 1 from transcript Pp1s9_312V6.1 (locus Pp1s9 _312V6) derived from phytozome v7.0 (chr-ID scaffold_9; po s 2138352 to 2139080 reverse strand)
gaaggtataacccctggaacgtattcttttttgtttttgtttttgttttgtttctttttttgacacacaaacggggtttttctcgatgcattgatggagtggatcatgatacaaggattgacaactcagctcctgataccaaataggcggagtaagtgtcctaagtgagagatctactcactaagacttacactttcgtgtacaatcaggccaccttgtggtattctaaaattccatttaattgcctggtctgttctggtacctagaaaacaatttgccatccaagaattgtcccatctcctgagaaaggtagcctcctgatcagggtgctttgccaatttcttcctgagcccctcgaacttattcaaatctgaagtcggtttgaaatgttgaactgcgcattcagtcagttgcggatagcaattgtaggttggtgatattagtagagaatattttgccctagttccactgtcgttcagtagctatttgcgttaagcaaaaatagagccgccatttttgagaggcgagtttggtcaaaagcatttgtattaattcttggttcagcgaatgtgatacgtgttcaaataaaagatgtttctttaattttctcgtctttttcgttgcttatgagtgcaataaatggcttctacgcggatgcttgagcccgttattcgatgagttttcatgtttctattgaggctttacagggtaattgaggacgcagtagaa

SEQ ID NO: 115708 - DNA, 992 bp, Physcomitrella patens
  Intron number 1 from transcript Pp1s121_122V6.4 (locus Pp1 s121_122V6) derived from phytozome v7.0 (chr-ID scaffold_1 21; pos 828968 to 829959 reverse strand)
ctggacctgggtttttgtgagtaccattttccccttagactgcaggtcagagcaccaacaagtttgtgtgcccaattatagcgtcattgcagtgggttcggctcacggacgttacttggtggtatttagcggttttttctgggcgttaatgttcagtggagcatttacttcggacttggtgttgattagtttagcgactgggtgcaaaagtttgggtagtttgcaattgggtgttgagtttttgtgctggaacgcaggaaaggagttttgagtgggaaaagagtggagcgagagctgtagctactaacgtgggtcggtgatcagagagcgtaattcaggtatcacccgtaatgtacctgatggagggttgtagcggtgatctttccgactgtgattgttggttactgcttgtcagtttgttggtagtcctctgcatgggtatcgttgtcattcccttcgtatgagtctgacctgtctctaaatgcatttcaatgaacctgtgatgtgggtggtgaaatgggtctggtgtccaagttcaaatgagttcaggttgtcgtagactgtgtgcttgtaggggggagagcacagcaagttggtctcattagggttcctcttcccaaacagtgaggaataatgagctttgattgagtgaatcagtccaaattgtgcgcctacttcattcattccaacgcaccagtccttcccatgagtctttcaccataattccaccattttgacgttcgactcagccattatggtcatcaaccctggcactatctgtgttctgatttgctttattgacttcaaccactgaggttttctggacccggtggcttgaatcctcttcatagacgtcccctgcatttcttttcagcatatcctgcatctcgcgcaacaattttgttccccttctgccgtccagcttcaagcctttgcttaaatcactttgattggcagtgagaaagaggctgagaaaggggagcctccagagt

SEQ ID NO: 115709 - DNA, 710 bp, Physcomitrella patens
  Intron number 2 from transcript Pp1s41_106V6.1 (locus Pp1s 41_106V6) derived from phytozome v7.0 (chr-ID scaffold_41; pos 853697 to 854406 reverse strand)
ctaaaataagtaaagttaaaggtgaaattttgttaacactttgtttcaattactgtattgatgtgatcagattgttgttaagtttttttataaaaaaatataatctggtgtaaaaaaaaaaaaaggataaaaaaaattaaaaaatcactgacacatataatttactgttttaatctttttttataaatatataaacaaggttgattcttttaaattgaaaattatcctttaaaacaaattccttaccactaagactaatatcaaaatccgattcttcacaccccacaacaccattctcacttcaatattctaaactcagaaacccaacaacttacaaaactcaaaaccaaaaatccaaacagccacaaattcaaatccactatgatccacacatcaatcacacaatccttgacatgctcaacattttgaaagcatgacttaatcaaacccagacaatacccacacagagtatcaaggcttaagctaagaacaacaaaggatcatatccttgccacccaattcaacacaacaaactaaccacatatctaatccacagaaaaccagatataaaaaataaaaaataaaaaaacttaaacacaaacataacaacaacaaaaacaaaaattatactaatctgccacagtcacataaagtaataatgaagggcatagaaatgagacgaataagaataagtgggggatgctgcagtg

SEQ ID NO: 115710 - DNA, 814 bp, Physcomitrella patens
  Intron number 1 from transcript Pp1s161_45V6.1 (locus Pp1s 161_45V6) derived from phytozome v7.0 (chr-ID scaffold_161 ; pos 310475 to 311288)
actgtggctcagggagaacaggcccaacctgaagggtatgctctcccaccagcacagcacacggacagctctcttcttcagtggattaaaaacagatagatctccaactcttttcactagggttcatactcaaataacccaatccctgggaagagggtttttaaaccattgtgttcttctgtgggaaactagtattagtgatattaatggaagggtgggggaggagggaagaatgtgcttagctgtagtcttttcacagaatcaaccttgccttcatcattgtatgcgggagatggtggaaaactctgacgagtccaggcagcagaggccgaagacgacaagtggaatgttcctgaggcagcgcccaccacctcatcagcacagcgaagcacttggttgcgagatcgtcttttttgtcgtagtgaggaagaaggggaagttgccaacttggcaatagaaaaacgctgtctctagccaggattccttgatactcaatgaacccatttgcccaattctgtcgcaaggcaaagagagacagcaagcacttacaacgatttcagaagatccttgacaaaatagtggtgggtccaacaagacatcgagcttaatatacatagttgttgttgttgttgttactattattattattattacaatgccctatctgtgttgaaaaacagaacccaactcgaggatcagctgtaagaaaatatgaataaaataaaaaatcatttgatgttccgtataatagtggaaatgagcgtgagtggttaaaacaggggaggaggaatccagcatcgattgcggaatccct

SEQ ID NO: 115711 - DNA, 680 bp, Physcomitrella patens
  Intron number 1 from transcript Pp1s32_177V6.1 (locus Pp1s 32_177V6) derived from phytozome v7.0 (chr-ID scaffold_32; pos 1186216 to 1186895)
tggatcccacagaggactcactaaactacaatcaggttcgttttctggcacctttcctgtttctctgtaggcgcagggtgttcgtctggatattgagatatcaaatgttggtaatgtatgtgaagaacgtatgttgagttcgttgctgaacttgttgaatgggctctagaagcttagaaattcgcgtctatggtaaagcatctgtgttgttttgatcgcgggtgagagaatgatttctttaaggacaaattgcagagaagcccatggttttatccggcttttcattgttcatcccaatttgaacgaaattgaattttggttgccccatctgtagcaattaactgaaaaaaatccccttagtctagcatcgtggtaattagataaggtgaagaaaactatgccgtggttgcttctaatatggacagacagacaactgttgtgttttttcatcgaaacgtattttgagaagtacatgaactggttgtttcacgcaattcaggtgtgtatgtgtgtgtggcttttcggtgcacctactggtgcatgtgggtgcgtctaattgtgaagtttctcctttcgaaaataatttgcagctaggaatcatagatgttttattcccattgatgctgacttatcctgtaatttcaggtgtttgtcagagactttgtacccagtgcattggc

SEQ ID NO: 115712 - DNA, 1056 bp, Physcomitrella patens
  Intron number 1 from transcript Pp1s182_7V6.2 (locus Pp1s1 82_7V6) derived from phytozome v7.0 (chr-ID scaffold_182; pos 96587 to 97642)
gtgcagctgcctgagtgctgtcccggcctgccaaggtaggtggtcttgccagggtttgttgtgcagtggctgttacgtctcccaatactacgagtttgagcagttgttttcgcagaggccttttgcagggtattttctctggcgttgtactcctaggaattggaggatttgcctttcggtagtggtcggctttctccgggctgttagatgtctggtggggcgtgactccctccgcgtgtcagcagtgatcacaggttgtgagaaacgatacgagcttggtgttcctgacttccgtgtcatcacaagaatagttctctttatgtctagtctgtagtgtgttggtggtatggattcgtgggttaagaaacagtaatactctccgtgtggagctcgaggactggaatcgaatgtttgaggattggtgttgtaggttctcttactcgacgctctcacggctgttccctatctctcaagtttagttctttcattcgcgtttcaatgcagtttctattttggtagcgaggcgtagggcgggtgattttggctcaatgattaataatgtgcaggggaggtcgtttaagcgatcgtaacccttacttggttgcagttggcttttattcacttcttctctgtgtgtctatcctatactcgcacgaccgtgtttagaattgtcgaatttgaagtggttgctgtagacgtcaaatggatccgggaatttaattctatcggtttattacgtatgttcaggaaggtgcaggttatttggctctttgcgcaagaccttgcactcatgcttcgcagtgtaggtgttcagtgtttgagtgttctgttggtaattgcggtcagcagattcgaccacttttgcaattgacacatccccctctcctgaagtagccattctttttcataaatttattgataacttatttgggttctggtttgtgagcggtgggcatcttccttaaactgattactagaaatcagctactaatggggtagaattatgtgacttgtttaacaggtttaattgattctcacttatcagcactggaccta

SEQ ID NO: 115713 - DNA, 603 bp, Physcomitrella patens
  Intron number 2 from transcript Pp1s35_260V6.1 (locus Pp1s 35_260V6) derived from phytozome v7.0 (chr-ID scaffold_35; pos 1389677 to 1390279)
gacatttctgttgccgatcgtcttgcgctaattaagtacgtttaacatatatatatatatatatatatatatatatatatatatatatactttcgttgcctttttttgtttttctttgtgagaatgccactgtttgtcaccagcgccgcgtttttttgattctcatctgtctccagcaccttaaattgatttgtgaagcttgggtacaagagtgggtattccgcggagtcttcgaaggcaagcattgcaaaagccaataggtttacgattaggtgatgacaatgcttggggtgtgtatgttcatgattctgaatttacattccgagttatgacaatactggttcctttggccacagtgcctggtctattccagagtctatagccactagttgcgtagttgtattattatggcttagaacgttttcattttattgtcatccgcatctctcaggtttgagaaagtactagtttttctgcatatgattgaggactgagggtggtaagaaaaaacagttattgcttgtgggaacgaggaaatatttctaacatgtgatgaacatcgtggcaggattggggttctgtttaggttagaattgatagaga

SEQ ID NO: 115714 - DNA, 949 bp, Physcomitrella patens
  Intron number 4 from transcript Pp1s59_8V6.2 (locus Pp1s59 _8V6) derived from phytozome v7.0 (chr-ID scaffold_59; pos 17337 to 18285)
accagcagatttacactagggctaccaacacataggtctgagatatcgtatgacatttgatttagtggaatttacctactcctgaacacttaagcggattctgccatcttgacaattgtctcttgtccttgttgtacatgaagaatttattaccttgttagctgcccatcgcctgctgttgtgaatgaagcggttgcagattcaagtatgcggtgtatgtggaattggatcagtatgtgagttgattggaggaacttgtcatctggatttgtgcataggctttttcgaattgtagttgacctttctttcttctttattgttgtatggttgttgtcgtgccgttactttcacattttttgttcgccgctttcgttagtttttatgcggtagttttgttacgaatgagtgaaatctttatcgttactttttctgccgtcaaattattttttcgtgtgatatcggaccacggtgttatccgttgatgatcgtggtcacgtgttaaataaaaaaattcgaaagtactggttagaaacctcaagtagtcatgcagcaccacttgcttgaaatagatatcagcatgtcgtacaccgtggcgacttatgattttacaaacgtcgcttggtactcgataagttagagattgcacatgttcctagcctgtgacaatagttcttgggaatggattgtcgtaattggttcgaacgaagctttgaattggagtttgagagatttagttgaggtttgtttgaactctaccgacggttgtttgaggatacacctgtcatcttcgtcgacgtcttcgtgagccgagcatctgttcgaagttgtattgctgtgtacaatcgaacagcggtggttatagattagatgctacgaatgcattgaagctaacaactagtcttcttgtggtccaggattgtaccttgcctgcttcggtgtgcttgcgaac

SEQ ID NO: 115715 - DNA, 617 bp, Physcomitrella patens
  Intron number 1 from transcript Pp1s104_16V6.4 (locus Pp1s 104_16V6) derived from phytozome v7.0 (chr-ID scaffold_104 ; pos 189220 to 189836 reverse strand)
cgttgcctcattctccccctgcacatccactacaggttttccttcccctcgaaacaggacctacagtgtcgctacagtttactgattgcccgttttgataacttcctgtgcactgacggcaattattggtgagtcggtgtggattttctgatggacactttctcaccgactcctggttttatgaggtttctagatcgtgatctaatccattcggccacagagatgtgatgggttgtgtgatggtgacaaattctcgctgacggctctcctgctcccctgttgtctaagagaacaaatgactggaagaagggttatttgattttgaaagtagctttttctgaattttttgtctaatgtgacagggcggttgatagatttctccgattacacacgcagaacgagcgaattgggtgatgtagagtagttcaaaggaactgcaagagattagattcatgagtgccgttatgatcaatcgacttccgagtaaatctctcagtttcgtagaataaggcagagtttcaaagagtttcctgcggtcaggaattttgctgttgtgtgacacatgtgatttctccagcgcaggtgtaactgaatcgaggtcaagtcatttgagcttc

SEQ ID NO: 115716 - DNA, 760 bp, Physcomitrella patens
  Intron number 2 from transcript Pp1s2_782V6.1 (locus Pp1s2 _782V6) derived from phytozome v7.0 (chr-ID scaffold_2; po s 4789363 to 4790122 reverse strand)
agcacaagctggtgatttgccccagtcaggtaatgaactaatactattctccataaagtttactctaattcttttgattaagttcacatttggggcgtcaaacagattgttaccacggttccatttgctgctcttcgcaaccccgccacaaaagggtacatgtttcaaagctcgaccacactgatatggcttcaagcagttcaacgccatctaatggtgttctttctgcggagtcatgactgagtgacgcacactcatgatggtcttgagtgcatgtgggtctggaaaaggagaggtgagtttaatgttggatttagtagtggttttgtaaagctcaaatgccaggtgtgctcaaagaagtcagcatcctagcaacagggtatgccccgcaacagggtatgccccgccggcacccaccctcctccgacaactctgatggggggcctacattaatgagcttcatctctgtcatcatccacatcgatgttcaacttgggggctcatggactcgctggggtgggtggatgttgatgttgatgatggtagttatggaacttgttgaccatggctatatccgagtgcaagagcggggccagctggtggacagttaagcaggtgcagacggggcacacatagttttgcagggcatttccccgctgctgggatgcagacgtatactaacattgagtttctgatcaattctaaccactgattaaaactagcagattacagtagagggtgtgctcaaccttccgcgtgc

SEQ ID NO: 115717 - DNA, 694 bp, Physcomitrella patens
  Intron number 2 from transcript Pp1s390_26V6.1 (locus Pp1s 390_26V6) derived from phytozome v7.0 (chr-ID scaffold_390 ; pos 266282 to 266975 reverse strand)
cggtcgcccggccaacgccttacgcgagcgcaaaggcaagcaaagcggcatccccttactcacttaatggcaatggcagactttgaaagagtttttagtgatagggaaacagaaggaggaaaaaagaaaaaagaagaaagaaaaattatagaaaattgtcaagctcaaagagacttgaggaatcaatagcttgagtgagaaaagcgtctgggtttgatatgaggcacgggccaagctgtgataaggaagacgtttactgtttcaagtgagcagggtttggtgttttggatgtcaaaaatgaagggtggatatctgttggagaccctgtggacgtgctgtgcctgtagttcatcttcggctggaatgctgagggcctaatttgatgaattccattcaatcagcgctttgacacattcatgttgggcccctctactgtgacgcacttgttctgagaggaggtatccatatctaaaattttcaggatgtggtttgcctcttctgcagcgtttgtagtacgtgtgctgtgtttatgctgtgtatcgacatgttggtgagggtttgacttttttctgaagacagcgttttcttaagagtatttatgctgatggtctctctgggtgggtgccaactgccaattatatgtttctctttgtgaacagcgagtccgtcaggctcaggattcggcttttcagta

SEQ ID NO: 115718 - DNA, 499 bp, Physcomitrella patens
  Intron number 2 from transcript Pp1s203_96V6.1 (locus Pp1s 203_96V6) derived from phytozome v7.0 (chr-ID scaffold_203 ; pos 778653 to 779151)
cttccccccttgacgctgtatgggaaacgtctcctttcgacatttcctagtcttctgtgacatatcaatgattctagtaggaaatttcataatttgggttgcatggttagatgcagattcttttaatcaaattcttcgagttgcgatgctttgcatgtactgctggtctcgaaaattttacttgcaattctctaattcttctatatttcacgattctaaaccagaggtcaacctacttttgggtcaacttgtggaaattttcacgagcaataattttgctgtaaccgatacctacacttcgaagttcagacccgaagctgtcttttctgcaaatgaaagggattcttttgtttagtttgttttatttgtttcactcccatcgtagcgatatctatatttggaaagattgaaaattggattttcagcttgcagtgaagctcgtcaaggattcagtccccttagggctactaatgcgatgagcgtgattgcaggcagttgc

SEQ ID NO: 115719 - DNA, 706 bp, Physcomitrella patens
  Intron number 1 from transcript Pp1s104_70V6.2 (locus Pp1s 104_70V6) derived from phytozome v7.0 (chr-ID scaffold_104 ; pos 509028 to 509733)
cggttccagggtctgacctaaaccctggattcagctacattctagggctttttcaatgcttaagtattgtgcagcatccgaagcagcaggatatgtttatgtgtagtttacacatatattactagcggaaactcatgctgttaagcacataacaaattaaaattaaaattaaaattttttttggttgttaagtcattggaaactgccttcattgcaacttgaacggaatttatgcaaatgatgggcatattgtgatcctcagaagaaaagccaattgttctctgtggttcccaaataacagtcttgcctctacgcctctatgtacatctaatagtgatatttctgaaattgtggacgattgggagactgtgttttcagggtgttttctaatacattgtggcaaatagctcttagagtacattacctgtccaggtttatatgcatgaggagtaattacaggtggtttgtaattgatgattcctgcacagatgacatgctctccaatcctgtcaactgtgcaggaatttccctgggaaccgccacataatatcttgaaataagggtcggagaaacaaaaaataaatcaaagcaacgagtttgagataaagcttggaagttagaatgctgtctctaaatgtttagcttaatgtttaatgatttccgtctaccagaaatacaacgagaagagaagtgtgtacagaaggct

SEQ ID NO: 115720 - DNA, 680 bp, Physcomitrella patens
  Intron number 1 from transcript Pp1s21_347V6.1 (locus Pp1s 21_347V6) derived from phytozome v7.0 (chr-ID scaffold_21; pos 2110117 to 2110796)
tcgctgcatttggtgcacaaattctacagatacaggtgcttggactagcttgtgtttgtacttgttgcgggggattagcaggcgaggtctgactttgtggatggattgaccttgttgttgctgtagaactagttggggagtcagggattccaacgcgcattttgtctcttggatcgccctgaagtggttgcatgttttgaagcttcacggccgttctccgcgcgtgattacttgcagttagtgtgctttgcttttcaccttggaacaaatttggggttgcatgtactttctcgtacgaatttctagttgtgatcgttgcaactatttcgtttgacgaggtgtttgtttatcttcttttattttgttttttttgtataatattttgaattttgtctcttccatggtggcattgcccttggctttacctggtgcgtgactttgagatctgatttcacgtacatgttcgcttgaattggttgatcctgtagtctgctctgtagtttacttatgtttgtataatttgtgtattcccttatgcgatagtgtgttcttttgtaccaagtcaatgcttgggaattgtttgtctggctgcatgttgtgttagtgtcatggggtgagctaaactcgactaatttggcaaaccatgaaagaatttgcgacgctcgtgtgctcgtgcaggc

SEQ ID NO: 115721 - DNA, 415 bp, Physcomitrella patens
  Intron number 2 from transcript Pp1s16_310V6.1 (locus Pp1s 16_310V6) derived from phytozome v7.0 (chr-ID scaffold_16; pos 2379909 to 2380323)
catcgactttcaaaaaattaggtacaagagttctgaataatcctggaagagacatatgacattttgattaaccgtggttatagatttttcccgattgtgtcattttgatttatgagatgttctgcaggtacattcacaagcctcttgaattgcttgcttctgtagacttcggtctagggagctgagtaattattgtgatcttgtgatagatggtcgaattctttctcattcgcttttctggtgctgcatgtttagaatccattcatttttctgttagtgttttttttgtcctttttcctttcctttcccaagtttgtgaaggggacatttttctctttagatatctttgtgtatttactctgatagttttatgtgttctttgcaagaatccaagaaattgtaagcgaagaagctt

SEQ ID NO: 115722 - DNA, 829 bp, Physcomitrella patens
  Intron number 2 from transcript Pp1s89_292V6.1 (locus Pp1s 89_292V6) derived from phytozome v7.0 (chr-ID scaffold_89; pos 1475638 to 1476466 reverse strand)
aagcagtaagtctatcttctgtaccgtcaacgatgtggcagcattttcacacacccttgaggcctaagtcttgtgtatctcgtttttctcactcgtgcaagctttccaatgcagcgtcagaaacaccaacgcatccgtgttgcattcatgtcgcgttggtatcggttagaaaccttcagcatcaccacacatagtccattttaaggttgaagttgtgcagccagttgaaaagcagtgaccacagaatagaccagtacgttgttatgttgtgtgggagaagggtaacgttacatgtggttgtgataattggacatcatctttgtactgcagttatggagtagggaagcgtaagtttgtgctggttggacacagcctcggtggcctcgtcatcaagaaccttgtatcaaagattcatcggctgtcaaacatgagtggtgaaagtgctttggacagagatctgcgaacaacatgcaggaacagatgctacgaaattagtcagctttctgaaactagttctgtccaaaatcataaacgattttaagccgttccaaaagagaaaggagaaattatctgtgaagtccgtagatgcttttggagacaagaggatgaatataatggcctttaccgaggggaagcctttgtacggagaagttagacttcaaagctatgcgctcaacttcagggatttagtggggtagaatatcagcatgctgtatgtaaggagtgcatttgaactttttgaaataagcaatgtatggccaaggctttgacgtgttgtggaagtggatttggtgcagataatagtgctggaagcatcagcaatacgttt

SEQ ID NO: 115723 - DNA, 919 bp, Physcomitrella patens
  Intron number 1 from transcript Pp1s442_14V6.2 (locus Pp1s 442_14V6) derived from phytozome v7.0 (chr-ID scaffold_442 ; pos 139465 to 140383 reverse strand)
ggccgtagcggtctaggtacccagttggtacgtgatactggatgaatggaaattcctatgagctcctcgcgcacaagaacattttatcacaccctaaaccataaacctgttgagttgtttgtaaatgattttgtttgtgtgtgtgagtgtttttattttgaaccccaaactctcaaccacgcacccattctacctctatttcagggacttttaacaatttgttgccagtcatctacccgtcatctatgtttgtacacactaatgtatgacggacggattgagtaaaaacgtcagattgtgagctgggtacctgttctgctaaatcgaccacaatcgaggatgtgtgaggactacttataactaccagaaattgtattaacaatgatcgaagtaatgagagggaagaaactaataattatatcagagattaaagtatttttatttgcaacaatacaatattgctgttagaaaccaacttcaaaagaataaagttttggaacaaacttgaagaagaatcaagtattccctacagcgttttacaaaaattgtgtggctactgtttaaaaactcagaatctcatctatactaaatgtaaataagtttgggttaaagttttactcttcaaatatcatcaaacgtcttagttcacggaaaagactattggaaggggttgatgatttcttaagttgatttgattacaaacctttgtgaaccattaacaattcctcctaaactcgtacacattgatgtgaaatttgatagaaattttcttgtgttatcaatatatgaatggtattgaaacaaaatgtgtgcactaatacaacaaaactaatactgttgtactaacatggtaatttccatttcagtacatcgtttgcttgcagaagttaggattgcgcaacttacctgaaggagcaaa

SEQ ID NO: 115724 - DNA, 385 bp, Physcomitrella patens
  Intron number 1 from transcript Pp1s185_115V6.1 (locus Pp1 s185_115V6) derived from phytozome v7.0 (chr-ID scaffold_1 85; pos 741393 to 741777 reverse strand)
tcctcatcaaagacaaaagattcaaaattaaaaaggtaaaccttctggagtttcatcctctattatcctaattggcggcatacatcgaagttactagaggttgcgattccgtctcgcactttggagttgaaacacgcacaagttttgattccagcagctttcttttatcatttgaaaaatattactcttgtccacagcttttaatttcctttatgctcttctataatgcgtcatcagttttgtacgtgatgagggttgacgttcacctaatcacctctttcagtggtgagcgaaagcagccaagcatttcaacaatgtaattgtatatgcgtttatgcgttggtatacaggcaacgcgagtttttcgatcaccgcaaggagaaac

SEQ ID NO: 115725 - DNA, 439 bp, Physcomitrella patens
  Intron number 2 from transcript Pp1s110_13V6.1 (locus Pp1s 110_13V6) derived from phytozome v7.0 (chr-ID scaffold_110 ; pos 35798 to 36236)
atcgctgaatcgcaaggatctgggtcttcttacatgtacgtttgttacttcctcctccgtttttcttcttttgtacattgtattcagtaaccttattggcttcattttgcagaaattttttcgattactcttaggtactctttcatgtagtttgctttatttgctttcagaaacgtaaccctagcgggtgagtgcattctgaaggtaatgctagtttaggtagcagagatttaccgatttcgaatgtggtaagtaaaatgtatttgtgaaggctagctaatgggggattgaattgcttcttttgagtatcttcaagtttttactagccaagtatttattcacctgtactgaataaaagcattcgtcacttagaatttctcaaggtatgcgtgtttaatggttcaaactacatcgatttttgcagtggatcacctctttt

SEQ ID NO: 115726 - DNA, 650 bp, Physcomitrella patens
  Intron number 1 from transcript Pp1s28_293V6.1 (locus Pp1s 28_293V6) derived from phytozome v7.0 (chr-ID scaffold_28; pos 1867945 to 1868594)
ttcagacagtctacagtggaaagtcgtttttgaaggtgaagttttttccgattctctctctcgggaaggacttgtagacatagactgtagattcttcatgttatggaaaaaaatcacacgctagtctctgatatcatgctaatggcacgtgttctcttcaactcattgacctgcattttaccatcattttgagtgagacctgcattttgttaataccaagtgcagggagaacgggctagttattgtgacttcgtttatatatttgattgtttatttctttttttattttttttatgcaaagaagggaatccatttactgcgtttgcttagaaactcactgctgccgctggtgctccaggtggtttgcaatatcgcattggatctaaaatgacggtgtagaacaacgtagggtggcaatgtacttgttcctgcaatagtttcatagcatgaattcgaactgcaatagattacacttgcagcaggtcctcgagcatgttccaagcgtggtgtaacccttagtaagagttctcgtcgtatctattggttactgattgatagtttttattttaatgtaggttactgagcgtagttcattgtcattgcatagttaacaatagtatttggtcttttggtatctgcagccacgaagt

SEQ ID NO: 115727 - DNA, 1004 bp, Physcomitrella patens; identical to SEQ ID NO: 115269
  Intron number 1 from transcript Pp1s100_231V6.3 (locus Pp1 s100_231V6) derived from phytozome v7.0 (chr-ID scaffold_1 00; pos 1296214 to 1297217)

SEQ ID NO: 115728 - DNA, 896 bp, Physcomitrella patens
  Intron number 1 from transcript Pp1s289_11V6.2 (locus Pp1s 289_11V6) derived from phytozome v7.0 (chr-ID scaffold_289 ; pos 58913 to 59808 reverse strand)
ccctccgtcttaattagctcctccgtttgttccaggtatggatggtggcattcaatgctgagtttccttttcacgattttggtttttatattttttttacgaattgtgtcttcgcaagtgtgtgtgtgtgtggaattgaatcttggtcgaggagatgtgtgatgcctgagtggcgagaattggtcgtaatgaatgttgagtggtggtagattgcttttgttttctgtttggtttgtgtgttgttgtgaagctgtgtgtgtggttgggtgtgagagattctggaaaggggaatggacgcaagattgagtgggcgggtggggtttgtttcgtaactggtgctgggtgagtgggattttattcgtttttttcgaatgagttctcttcccgctatcgaattttgagctgccttatccgaagtttttatgagttgagtatctgatttacaaattgtgtactgaatttgagaggatagatgagaccgtattggtaacgaccctgcaggatcgatctcgagctttggttgattttgaggttcatttccttagaccatggggcgatggagcctgatagcgttgaatcgcagctttggttcctaagaactatgagctaatggattctctaaaaggaaaacagcagactacgagcactctgctacttgaattggatgataccattttcttgatttccgttttacgtctggtgtaggcttagagcttaaccagagactgctggtcctttatatatatatatatatatatatattattttttctcgcatgaatcctgattgcaggaagggtgactagcagcaattcgtccaatactcgtctgattgagaatttttcgttggtcatctgtgcagagatccgtggttgttgggcaaagtgaacaagagaa

SEQ ID NO: 115729 - DNA, 927 bp, Physcomitrella patens
  Intron number 1 from transcript Pp1s518_7V6.1 (locus Pp1s5 18_7V6) derived from phytozome v7.0 (chr-ID scaffold_518; pos 97522 to 98448)
aacgtaagatttttatctagttatatttttccctgttttcttcagtgtcttctagttccacctagaagacctgttcttcaatcgcacggcaggctagaatcggctcacagattgcgccgtcattacgggtcaccctcttctgatttacgtagttgtgacagaggaaggatcaccaattctcaattgccatgatctctttccgactgtaggatatttggtcgattaatgagaaatttagaagtctttatggaagacttcttattggaacatcttgtaattccccaagtaggcgacgtatgaacaggggtttgagattttttctttgcatcttttaaattcatacgcattatacgtcgattcggtacttggtgtttgtatactgtcgtttacctacttacagtcaacatcttacttagttgtgtgaagcacagtaacattagctcaactttgcctctgctttgagtaaatatttcttctcaacttcacatccaggtgataataacttcttttacctgacccttgagtatgccgttgcttttcgtatgatgagttgtatagttgtagagattggagttttattattcccacacatgtctactgcttgttccatcgtcattattaatgcgaaccattctcgaagtcgaagaatccctagtaatgcaggagaaaatagagtttgtctcctgcgcgtctagagctgggaaatctattatttcgcttgcagttacaatctctagcgttaagagataaaggtcaaatgacattcaatgttgtatccatgctaacttgtgaagtctgacgaattgtttacaggactactgctgttcacagatgactatcagtttctgctattttttttaatccatggagtgtttgaattcatcaattagtcatcgatttccatttgccagcgattaatctatctca

SEQ ID NO: 115730 - DNA, 432 bp, Physcomitrella patens
  Intron number 2 from transcript Pp1s134_55V6.1 (locus Pp1s 134_55V6) derived from phytozome v7.0 (chr-ID scaffold_134 ; pos 443159 to 443590 reverse strand)
tgcacaagccaactttggccgtacgtaaatgattctttaaatctgttggttttcagattacagcaggcaaagtaaatatgatattggcgtgtgaatcttgatttttgaattttagcggactcttagatatgattgcaggaaattatcatttttggattcagatatatgaatcatgaatgctatgggtggcagcgaagcatattgaagttgcagagcaaatgtaggggctcagaaattagccacaatgtttttagtgtgttgttctcatgaactattgagttgctgtctgaataatgtggcgttatcagttttagagggcacaaacctaacattagcatgtgcaatattttgaaaggttttatgtcctgacatttcagtgtttttcttgtctgaacagttggatcacgatcctggggccccttctgcactagc

SEQ ID NO: 115731 - DNA, 857 bp, Physcomitrella patens
  Intron number 1 from transcript Pp1s207_36V6.1 (locus Pp1s 207_36V6) derived from phytozome v7.0 (chr-ID scaffold_207 ; pos 302851 to 303707 reverse strand)
tgaatatgtaagtgcggaaactctgctcggggttcgttacttgtggagtgttggcgtggttatgtctacgtgatgtttggatctgctgctccatcatttaggtgtcggtagagattggatggcgcgggactttcactgaaggcattagggtttgacctcaaaacgacttgtgtaaggtggaggcagttcatgcggtcgcatccttattgagtgcccctgtcaccgtttttaattttcaattttcaatttttattcgtctaatgatatttatttgtttatattggaacgttcgatcgttatttagattgtggagaatattgggagctggattagtttgagcagctagttcaagcagcggctcggaaataataatttctgcattgaaataatggatcggaaagtttggatgcatgttttctttctacatgaaaatatatatatatatatatatatatatagggctgcaaatggtctgatatcgtatcgagccttcaattcactgaaatgatgctgaatttcttttcctttttcgttgagaactctactttacgccagctactggaggtctatctgagtcgaacttgaatccttcattaattttggaatgacagtcgaagtagaaattgaaaaagtagcgtttcttttcttcacttttgaactgaagaaagtgcacatcaattcgttcgtaagttatcctccagcatttagtcataatctgcagcatctgttctctgcgtttgagaaattagtccttctttatggttatacgaatggtctcgctggcatcggtgttcatgactttcatcaaactttgttttgttcatcgcaggtgaaagaaatattggtggaggaatcca

SEQ ID NO: 115732 - DNA, 569 bp, Physcomitrella patens
  Intron number 3 from transcript Pp1s141_96V6.2 (locus Pp1s 141_96V6) derived from phytozome v7.0 (chr-ID scaffold_141 ; pos 692088 to 692656)
cgaccaagaaattgtggaccctctcccagattttggtaagatgtttcttattaagtttgcttatctcccgtttttgaaaatttgagcaatttctatgatgaggtggttttgcaactgtactcccatctgttggaatgcctggcgtgtcactaagcgctgaatgctttgacgaggtgttatgttatcaaatcctcgctcaattatttccgtcttgttctttgaagaaccttgtgtatttgcttgtagaacatatcaaaaaaacgtatatgcacagctgactctctgtaaacgattaattatcaatggaagagggttggttcgtttgaatgaatgtatgatctttgagtctgtctatcttctgtctaggctcagaggtattattggctacttgattccgctcgaaatcttaagttcatgacagcgtgtatcccatgtttgccaacttggttttatgcagtatgtttttcatatgtttaagtagcattgcatgcttatttcgttcttcaagtgggtgcagaattgcaacactgatgatagccagtgtgatgtgtggatagttttggcttcag

SEQ ID NO: 115733 - DNA, 1065 bp, Physcomitrella patens
  Intron number 1 from transcript Pp1s156_86V6.1 (locus Pp1s 156_86V6) derived from phytozome v7.0 (chr-ID scaffold_156 ; pos 523003 to 524067)
tcaggacccgtctttggtgtacaaccgtatacgctgtaagtttaattcattgtcatgtgattaataaaagaatgtatttttctgaccctgtactgccgatgttttctttttctttttttttctttttttctatttattcagtctgaggtgagactatctgcttgtacagtcaaacgctttcttgttttagggcattttctgagttgcaatcttccaatctcagcagatctcagggatgcgtcatggtacttatggtttattaaggtggttgcgagacagtgcaaattctaaaagctggtacttggaacagacctgcgtaattctggagtaattctgaccatggctcgaggtgaccgatggcttcattgtatgtatttactgattttgattctatgaagttcctatgcatttcttcttcttcatgtttgagtgttctaatttcctcccaagcgccgccgcaagtggatcaacagttccccattttacaaaggtgcaatggtttccttagaatcaattcaagcttgctgctgccaaattcgttgaagagatcaatgtcctcttcacaaaaccatctaagtgcctgtacgccttgttcctgagagcagtttccaccttgctattcactgcggacacccatccgcaatgcaaaaactcactttcaaccaataaaagctcaagagagaaaatcttgaacaccaccacgcggatctcatatttttgaatctgaggggtggtgagagcccgctcagaactccaaacgttttgctagaccgagatgaatgacttaccaaccacattaatgaagacttctgacgtgcttgccgacgcaaatgtgcagagagttcagatgaacttgtgagtagaagttcaatgaaggggatatgtcctgatgatagtggaggcttaactgttacagtggaggacaaacttggaccaagtagtaatagtagatcaggtacaggcagggaaggtcttgcaagtctttctatcttgctctcatgaaacttgatgactcgtgagatgtgttcagttattgttgcaaagtcctttcgtcaacgctagcga

SEQ ID NO: 115734 - DNA, 950 bp, Physcomitrella patens
  Intron number 2 from transcript Pp1s128_42V6.1 (locus Pp1s 128_42V6) derived from phytozome v7.0 (chr-ID scaffold_128 ; pos 401069 to 402018 reverse strand)
gcttccagagaaggtgagcacgatttctgatgcacgttttctgtttcactatttaatttttttgattctaagcgtttgcttgttgagatggaacttttctctattcttgacatttataatttaagaatgttttttaggttaatcttcgcgttttagcaatattttctcttcttttggaaagtttgtggaatacaatctttcattagggtatgctaaaataaggttgtgtcctctcccatctctccccgctcattggtgggtaggtttctcgtaggattatctgttcctttataatccacgcttggagaattatgaggtgggctcctactcgagtacgaatttagtgtaattattttatgtgtttctgcgcagtctgagtcgggattgcaaatattttagacaaacagcagttgttcgaaatttccagctctagaaggttggttcagaattcaatcgtccagactgagagggtttcttacttgtcttgaagcacttcaccaaaaattattgtttcgccctgatgcactcatgacccttagttcagcagcatcgaagtttcactaatagctcacatctgatcgtaggaaaggataaaagaatgtgaaaaaagaatcttcttctgaatttcaatcgaaaaccattctgtcaaactcggaatcaactgcctgcaaaacttaaggttaagtaagaagacataattaggttttcagttttgttgcaaagctgtagcgataactacaacccagaatactcaacatttgtgagactttgactctacacatgccgaattgatcccatgtgaaaatggatctgcaatttgggtaattcggagttttacaatggcaggaatcctcagcatatgttggttgtaaggattgaaatgattgaagtgtttaaagtaaagagatgtatggattggacctcgtccagggcaagtgtcgtggaagaag

SEQ ID NO: 115735 - DNA, 365 bp, Physcomitrella patens
  Intron number 3 from transcript Pp1s110_134V6.1 (locus Pp1 s110_134V6) derived from phytozome v7.0 (chr-ID scaffold_1 10; pos 1216759 to 1217123)
cgagttggtatgattactatccttgcatttctgtcttcgaagtgccagtttcaacttttacgatgtaattttgtattactttatgcatgatggacttatgatggactttcaagatcgtagttagtttttatttatttatttaaattctccataaattggtacatagataatgtctgcagttggccatattatttcacgtcggtagcggcctcagtttttttttttttttaaaaaaacaaaatctttgattctaattatgtaaaattttctttcctttccgttttctttcttttttcaaggattgttaagatgtagacaatgctaaagtttctttgatgttgaattatgaaggtcggctggaaggg

SEQ ID NO: 115736 - DNA, 720 bp, Physcomitrella patens
  Intron number 1 from transcript Pp1s2_72V6.1 (locus Pp1s2_ 72V6) derived from phytozome v7.0 (chr-ID scaffold_2; pos 419575 to 420294 reverse strand)
tacgaggtaacccccggtgatggcggcgaatgtctatccacttgatgtttgaataggcaatacttgtgtgcttgctgacctccacaggttacttttagaatatgaatatgaatcagttcatatatatatatatatatatacacgtacatacttgcacacacacatgatgacttgaactggtagctttcgcaaagaggaaattgaatgtcatagcttcattttgcatctgctacaatgtgcacccgagagagtggttaagcagatacatcccactaataccctccagggagactttgctgccaacaaacatccgatctaagtagtcaatcctttgtagtttgaaataagaaaagtgattaagacgttgtttttctggagatgaatgccaagctaacatgcttttcttcctgagaggttatgcctcagatctgttttaaacttagtaaaatgaggttctcacatctacctcctccagcctgaataactgtacatagatgaattgatttgcaggaaatagaagatgagtattccaattttaattggtttggttttcggcaggacaaatttggaatgtttttttgtcgtagaaacctgcagtgtctttctcactggatctagctccatataacttttgggcttgcttcagttttggaaattgtgaatcagtttcctgtctgatgtacaataatgtgtgcagggaggacagcttccttaacttgg

SEQ ID NO: 115737 - DNA, 825 bp, Physcomitrella patens
  Intron number 1 from transcript Pp1s20_354V6.1 (locus Pp1s 20_354V6) derived from phytozome v7.0 (chr-ID scaffold_20; pos 2450111 to 2450935 reverse strand)
gacctggaggtgggaagcatgggttggaaacctccctcgctactaatcggtgctgttgcttttgttcatttatttacaaatatatatatatatatatatatagaatctttaatctctctgttagaggagtatcaccagcttcttggagatgattcaatgaaaacctttgtgatcgatcacaatcggtccatgtgggggaacttcttctccccccctcccagctttctacttccaacgcacctctagattggatgtgtttgtaaagttcataccgatcgttctcccgtcaaaagaagctgcaaagtgcacctgcaagccttgactaaaaaagatatgaacccacaggtcgacattgctttaagagttcgcaagctaatgccgctctctgtcaaaatcaaacagtgctgcgaactctaccaaagcttccgacaaagaaaaatgcaggtcgcaaaataaataaataaatcaaatcaaatccttgtgacgatggcacaagcacagtgggtggtccaaagcaattcagttctcgtgacatggtatgatgaaagtacacaaggaactgtgatcgtcccattccaatccacgattacactgttgacacaaaagaggatgaggtcaaggcaactgttgtccgccacgacaagtcgaagccacaaaagtcctcattcctgcaacaaagagagtgcattgcagaattccaacactgcatggaattcagtaccccccccccccctccttatcgagagctgattacacagctgggatcctcacaagaatggtgtgtttgcagaagcagtatttagcaactttggaggctgagattgt

SEQ ID NO: 115738 - DNA, 723 bp, Physcomitrella patens
  Intron number 1 from transcript Pp1s257_60V6.1 (locus Pp1s 257_60V6) derived from phytozome v7.0 (chr-ID scaffold_257 ; pos 345949 to 346671)
ggaaaacttcaggtgagaccctaagaaatgctcaaattacaagttgttggtgatttgtgcttcttttaaaataacttgcaggagtttttctcatgttatgtaatcgtatggaagaaatgatgatatttatgttatggttgtactacatggaaatgcaacaggtgatttacagaatgtctacactcactaaaaaactacaaagtgcaacgttgttgatctcagtttattgaatgaccctgccgatttaagttaaatggatctttctggattcctttttgatcttgaaaacataaacttagctgcttataattgacatatgcttagctgcttgcaaaattccttgattcgttagggtgcattttgtagcagttgtagacatgctgctgaaatgataggattttcttttggtttcttttggtgtgttccatgtgtcttcagaattgaaaacaacgtgtcaaaaaaaccaaataggattgggagcttcttcattgtgagaatgactgggctctcttgttattatctgagagcaagtttattgttgtgccaaactgtacagttattgtttacgtgttggggtttaggtatccttgaatttatatttgctttggcatgttggagctccaagcagcacaagcatgcttctcacgattagttccatatcgtgaatgaatctcgaggtatgttgcagcaacaacgcgactcaaaaaccatcaagaacttgct

SEQ ID NO: 115739 - DNA, 609 bp, Physcomitrella patens
  Intron number 2 from transcript Pp1s58_157V6.1 (locus Pp1s 58_157V6) derived from phytozome v7.0 (chr-ID scaffold_58; pos 866137 to 866745 reverse strand)
ctgctggagtgtgccgcgataatccagcagatcgggtgagtacattttgattttcatatatcacacaatgttcatgaacacgtcatgatagggataacagttgctagtaaagaagatatacaacagtctcacctcgcaagggagtggtcgaaatatcgccaagtgtaaagtcggtgaacaaagccatccccagtcctcggagtgaaaagagcggtttgaatcgcgtagatctataagcttcacctctaatcaggagtagatcggtgaggtcacacatctattcttttgtggtccgatcaattgaatgagtgaagtgtgacaccactccgcacattcatctcttaggttagggatagtgtacaggattgaaccgaaagtttcagcaaacagtaattaagagacggttattcatagctagctccaacggaatcgcagtcgcttcagagagttcatgtgtttacagaccttgtggcaactgagcagctactattgtagatgtctaaaactaatgaagcacaatacagatagatcctgttgcatagccatcaataaccttacaaacttagcgattaacatctgatgtgactctactgtgacaggccaataccc

SEQ ID NO: 115740 - DNA, 665 bp, Physcomitrella patens
  Intron number 2 from transcript Pp1s106_22V6.2 (locus Pp1s 106_22V6) derived from phytozome v7.0 (chr-ID scaffold_106 ; pos 144673 to 145337 reverse strand)
catcgaacatagaaagttttggaaaaacgttagaggtacttgtcgttactcccagggtggcaacttcctctttacacagcaggatgtcggcatcttaagcctctttttagggtttaatatcaattccctaaaatctgcaaaccagtattttctactccaatttatgatccatcattggtcgtaaatttttactttgttagcgaaaccattacaaatactagatgagcttttgccctatgattatcttgccataattgaattgtaatctaaggtattatagttttcttgtatgatttgtggtttgtatcttcataaaaacacttaatggcaactttgttaccaagattttttgtgtgattttataagttgtaacaatgaatttagtacaaatatcaaaggaaaaatattcaagtgttgtgattgaggaagtttacggccccacgtcgttacttacactgctttttctgcatatatgaaaaatttgattgagttgacctcccaaactaatgacttgtaacgtgatttgaatttaagttgcaacttttaagtgaacttgatgcgtttgtaatcatggaatctcggatgggttaatctagcatccttctctttcctcgttttacaaatgtgcagcacatagttggtcaactcgaagtcctcacacgaac

SEQ ID NO: 115741 - DNA, 609 bp, Physcomitrella patens
  Intron number 1 from transcript Pp1s130_272V6.4 (locus Pp1 s130_272V6) derived from phytozome v7.0 (chr-ID scaffold_1 30; pos 1038736 to 1039344 reverse strand)
aactatccctgcaatcacatctgggtacttgagtagttcggatatcgcatttgccattggatttgttggaatccttcgactttcacagtcaaacagaactcgaggccaaaagattcgcacattaagtctctttcggtctggtaggttttgaatcaagtagtgggaattgagggcgtgggggagaggagttttgtgggctcggtcggaatctcatgtatcgattgtaaaagcagatagtgtctcgtggttgatttgattgcggaagtggagttcagtagcccttgttgtaggatatggtttgattcgaggaacaatctagttgtaagaatcgcgccaggcgcgaattccttgagagcatttctttggcgtgtgttttttttggttgttgttcaggaactctaagtaaaccattctcttcttttttctggatttccctccgactgtagaatggttacgtttgtgtactgtttcaggatttagggtgtagggtttaagattcaaggtgaagattttatcgtcgttagaagattattggggaagcttaccaggacgccatttatcaatgccatcgcctgctctgaacacgttgataaactgcaggaagcaaca

SEQ ID NO: 115742 - DNA, 974 bp, Physcomitrella patens
  Intron number 1 from transcript Pp1s16_308V6.1 (locus Pp1s 16_308V6) derived from phytozome v7.0 (chr-ID scaffold_16; pos 2370602 to 2371575)
acgccgctgcacctcacgtgctactacgatctcaagtaagaatgacagatgctgctgtttttcaggggattgaatgatttgtagcgatttacaattgtgatggctttgggaggtttgggaaattgttttgtcgactgtagaagttttgatgaacataatttgttgcgtgggagactttatgtgaggttagcgtgggcgtacttaagtccgagcaattgatcacgtgggaggtgtggctagacttttgtgggttgcaatcaattcctacgacacgtaattgataagggacattgtgggtatctgggagttggaacctcaggtctgaaaggcccttgcggaatggcacttcttcggaaattttgcctgattccgttgctggtcacaaaatctttggaggattttgttatataattctaggagaattcaaccaattttagggctactattatcgtcagttttgggactttgtggctgttgtgtgttgaatccgtttgctcgcgtgtggctatccaatatggcagtgtcttggatactttcttatgatcgggttccttcgaacatcaggtggttagggaattttcacgaatctcgttccttgttctcaaattcccgatggagttcgagagtcttttgattgcatgcactttatgtacgcgtctgtgagctagagacagattggtttcctctaccctgcaaataattattttcctgccacttagagttgttgagtctggcgtgaacactcaggtcgtatgaacttcacaaaccctatcgaattgcaaccttctactcttcgcggaaggggatgattattttttccgtagggagaattctactatagcgttgtctacgatttcatgcttgaaccgattgagcacacgtgcgccttcttgtaagtgttgaagcactgaacatgtttttagtccctggtttgatctgacttgctctacactcgcgctggatctgcttagggc

SEQ ID NO: 115743 - DNA, 522 bp, Physcomitrella patens
  Intron number 1 from transcript Pp1s187_22V6.1 (locus Pp1s 187_22V6) derived from phytozome v7.0 (chr-ID scaffold_187 ; pos 103560 to 104081)
ccattgagtgtgcaactgcggtatgagtacatccccgagtgcttgttcttcttcctggtggtgattcaccctaggtcctctggtctggtgctaaccagtaatgatgttttgtactaagtataacgtgcttatttcaatcagtttttagatatgatatgcttttacaatttcaatgggtgccttcattgttctataatttgcaccattataaagcagcaaatctgcaccataaggtatgaatttcaaacggctatcatggccacttcctgttgaagaaaaaaagtatgttacaggcattcttatggtacgaatgtgctgccttctcaggacttagggatgcagtctctcaatctgaagtgtagtggttatgaaaaccaatatacacgctgattgatagctttgtacaaatgagtgtaaaggcatgtttgctttgtcatttggctattggcgtttaatcaaaagttacataattaattttggaggagttggaatgggtgtgggtaaaggctctcgacaagtaca

SEQ ID NO: 115744 - DNA, 457 bp, Physcomitrella patens
  Intron number 2 from transcript Pp1s187_22V6.1 (locus Pp1s 187_22V6) derived from phytozome v7.0 (chr-ID scaffold_187 ; pos 104137 to 104593)
tccaacgtggcactgcgttgttggacgcaatttcggtgagttcttttaaaaagttcaattatttttgattccagcaattctcaagaatgaattcgtcatcaaaagcaagaaaaaataacttggcatggaattgtattgacatcgtttcaactttctatttactgctattgcttcaatgctgggtctagcatgtgcactccgatccaagtgagaatgtgcatctcacttcagaagtttttatcccagagtgaaagggctctgagtggtttctgaatctagcacaagtgttaacttggaagtacgtcgtatcttcattctgtacgataaatgctaccttgaccatgacgggcgtgctaccctgtggcactcagttgtatgttgacttgtttactatgttcttccattttttttctaaatctaatttatagctcctatatttatattcttgcaggttcat

SEQ ID NO: 115745 - DNA, 972 bp, Physcomitrella patens
  Intron number 1 from transcript Pp1s139_13V6.1 (locus Pp1s 139_13V6) derived from phytozome v7.0 (chr-ID scaffold_139 ; pos 84761 to 85732)
tggaagtcggcagacgagctgaagctgtgacaatagtatgtctcaattacgtcaatttgcatttcctgctttgttaggtgctatgtgcatgattcttcgcgttaggatgatgcgagaagtgttcgatacgtttggtcgattgtcgcttgggtgttcccttctctgaattaggttttttgtgttcagattttgagttcattgatgtaagtgctgtgtaagtatccttcttgtactgaatcgcggttttttttttttttttttttttttttttttaatcgttgttggaacaatgcgcttcaaaattctgtgcattcagcatgtatgcatgcgctgaccaggcaatgcagagtgaggtgaggtgaggcgagtcgattgtcttctcttatttctgctggagtgtgatatataatgaattgaagtgcaaccactgacacattctaggtttgttatgaattagagagatatactatagagcgttcgttcttgtcccacaatcttgctcgtacgttttaaggcgaggttatgataagagcactggttagaatttagtttcttcatctagggtcaatgctagttcagtgttaaaccctctgtctaattcttcacgttgcttctgagacccggaatatcactttaccttgtttccaatgagaatcttgaatagttgtgagtgactagacgttggacgtttcagccagacctgcgtataatatgcaactgctttcaaccagaatcagcgaggctagtcttcaagagtgtataggaaacactatgttcagggcgattgttgcaattagtcgcaaatctttggtattgacggaatttcaagaacacgacacaattctctcagcctgtatgctactgccatgttattatttacgttccaatcacatgtccgcggaatatttaattgagtttcatgtttacgagactgcagggtggtgtgcaaactgtagcgcgggacttccctcg

SEQ ID NO: 115746 - DNA, 923 bp, Physcomitrella patens
  Intron number 1 from transcript Pp1s223_131V6.1 (locus Pp1 s223_131V6) derived from phytozome v7.0 (chr-ID scaffold_2 23; pos 726950 to 727872 reverse strand)
acgtttcgtaagtgtgcaccgttgtttatgaaattgaaggacaactctgcgttccaacttcttttcattttctgccgttgcggaagaatcaaatagaggggtttgggtctaatcctgacccatgacaaggatttaagggttaagctatatttcgaacctacgctctggtgtaggttggtgggaaacgaaaaactgtgtggatatccaacaaactgtcgatcttcatttgaggttgcataggcttctccaggtacataaactgaaatggacaagttgttttcagacttctaacagacaagcataggaactgcgtacaacatgttagtcatgatctaacataaaagaatttttcacaaatgaatctacattgttgtggatcataacagacacaaatggtttgcatcgcatgcctccttacaaaatgccacattttcgactccgacaatcaagaaaagcacataactaagtgccaattacagcggaattcgctatcaaataaaatcactcttagaacaccttcacagctttgttcaatttctaagttaaagatgtagcaatgtgatgagcaagcgcagatcgtttgaagacgaatttataacattaaacgtggaggtatttcaacggacaatcccagcaacgatagaggaaacgaattgagcgctgggatgatcgctgctatctgcgttgctgcatttgtggtgagtaaaagtattctcttctcgatttggtactgccggcggaagaagattaggagctattgcgaagtgaaattataaggtaaggagaatggttcagtttgttttcactgaagaacggcgttgtgtcctttttctgtaacatgggaagccaatggaaccagctgcagagatcgttcgccttactgggatctgacccgtagttttttaatttgcacaggcgggaga

SEQ ID NO: 115747 - DNA, 638 bp, Physcomitrella patens
  Intron number 1 from transcript Pp1s4_413V6.1 (locus Pp1s4 _413V6) derived from phytozome v7.0 (chr-ID scaffold_4; po s 3439326 to 3439963 reverse strand)
ttgccgcatcttgtcctttcgaagtctacgtgggagtacgtcgtccacccaattcttggagtcaagagtttgtgtttttcttttttcttttttttcttttcacttctgcttgtgttttggaagaaatatggttttctgacctcgcagtgcggtgtattccgagaccttcttcatgggatcgcgtagtgtttttcttacagggaaatcttctatcgtattcccctgtatgaaaattactacgcgatcgtcattggttttggagtgatatagttgctggtgcactttcgtcacggtgcgaggaggggaggtggctgaccagcgcttaattttgtaggatggttaatttctttagttaatgaaaattattacagacttagcttcggtgtgctaagttgcgtagctaaaatgcaaaacttgttgaactgtagtttcaaatcatctctgggatgtttcaaaattacccctacatagaacagtgtgccgactttgcggaaattgttgtggaagggatcgagcacatgcaaattggatagattaacatattcccattgcatgatattccgaaacatttctattcaaaagtttgattgtagctgattccagagtacagccgtggggtgcggcctattatccgaaaa

SEQ ID NO: 115748 - DNA, 716 bp, Physcomitrella patens
  Intron number 2 from transcript Pp1s59_16V6.1 (locus Pp1s5 9_16V6) derived from phytozome v7.0 (chr-ID scaffold_59; p os 42217 to 42932)
cttttcctgttcacttcaggatttgacaaggaattgcccgattgaattccatgatatgggctcgaatttggccttaggtgacgcgtgaacaatgttgtgtttatgtttgagttgttaggacttgaatttcgcggtgatggtttgattctccgaggtgggtttgcgaattggagctaggatcggtgaagtctttgagttttagtgaaggtttcggaataaggggagtctgtgattttagggtttacaggattgtatgcagagcgagtgtgggagatgatgtattggagtcctttcgagggttggatttggtcattacgttgggtgacgtggatacgcttgcaatgtggaggtcgtgttgctttgagatggatattcggtgttggagagagggcggttgggagagggaggaaattgcattcatattgtaagtgtgcgactgttggcggtgacatgtagagtttatgcgaagtgattgattttttttcttccttgctttattacgtgagtggtaattgcactactttttaagagtaggggagggatcagctactagtaatttacgatgcaaaatatataaaatcactacttttgagttgtatacagtggaaatcaaattgtgatactgatagtaatcggaatctgatcgaaatgtcgattgttcgtttgaattgtttcttgcagtgtggtgctgcatcaacatccctttcgcctggagg

SEQ ID NO: 115749 - DNA, 889 bp, Physcomitrella patens
  Intron number 1 from transcript Pp1s41_160V6.1 (locus Pp1s 41_160V6) derived from phytozome v7.0 (chr-ID scaffold_41; pos 1330013 to 1330901 reverse strand)
tgtttcaggtggaattcggaccttgctttttggatctctctctctctctctctctctctctctctttttgctgttttgttcacgcttctccttgttgaggttaggtcgtgcaaggtgtctgactatagagctgcattattctcttttcacgatcttgtaagatgccaaccttctgttggttgtatcgtttctcatttagatgttagttcttcgtagatttttgaaatttggacatggatacccgattttggttttggttttggttttggtttttttttttttttttttttttttccccggtcaatgttgaatttattgggttgttgttgttgttgttgttgttattgttgttgttgttgtttttttttttttttttttttttgccacaaactttgctgtagataattgcaggtgttgcaaaatgaagagctgtttatactgtttgaaatcgggaatagactcttacaatgtgctgatggagtcatctgtaggataacaaacagggtcaccagttgttagttgtgccaagtatgtgcgtgatttccaccagctctgatgaaacaagacggtgtgtacttgttatctccgtcagcattggttgctgaagccattcatgtcacagtgatatatgagcatgaacaattttgtattttatttgtgtcgtccgatttcatatacaatcatttccaatttcctaccggctgtactgtcccaagccgcgaagtgagtaaccgttcttttcccaggtatagaatagccgttactttctcggttgttaaaaattcgtgaaaatgatctgcacctaggtttaatgccaacacctagtgacgttgtggggatggcggatgagacaggggttagattacgcgatatatcaagctcaaaggaa

SEQ ID NO: 115750 - DNA, 490 bp, Physcomitrella patens
  Intron number 1 from transcript Pp1s292_39V6.2 (locus Pp1s 292_39V6) derived from phytozome v7.0 (chr-ID scaffold_292 ; pos 307394 to 307883 reverse strand)
tgctgtcacttctgtcaaggatcaaggatcttgcggtaagttaagatcgtgttttggtaggagctaagtggcttgagatgtgtgtaatcgagggttcgtggtttaagctctcttgggccttaacaattgtggattatcttttgggttgcaatggttgattctaggcgttctaagattttttttttggatttcctctaagaattctttgtttcattcaaaatttcgcattgccgctcataaaagatggagctatttttttaatagaagtgattttccacctgtgtagaccgtggcttgtaattgagaaggattttatgcactgcgaactgggtttgcttattcttagcaactatagcaatattcggctccagttcctgagtgtatgtttaggtaatttttgaacttcgtttgatatgtcggtgcttaacaataatctttgtatgtgcggccatcaggaagctgctgggctttttcagcggttggatccgta

SEQ ID NO: 115751 - DNA, 645 bp, Physcomitrella patens
  Intron number 1 from transcript Pp1s44_297V6.1 (locus Pp1s 44_297V6) derived from phytozome v7.0 (chr-ID scaffold_44; pos 1841251 to 1841895 reverse strand)
cgctcctcaggtttcttctcagccttgatttccttatttcctcctcgtctctctttttatccagaaattgtgatttcacttcttctcttttccctctttattttgaaccgattcttctctcttatattgccctgtatcgagagctttgactgctgctatgttgaattcaatcatgcatcgagattagtcgtttagttgttaattttttttttgaaaagtaatatgtaatagactctgtcggagtttgaggagctgaatgctgcgcctaacttatgtgcgattgtggtctaggatgatggacgcgatgtaaggttgtgtcgttgatactcgccgcgcagttttggacgcatctgttatggctcattgtagtttctcatgtttttgtcgctggagtttagtaagaattgttcgtttgagtttgagtgttttttttttttttttttttttttttttccttttgttttattggaaggagatggagatggcctctgtcgtattcctgtgtgccaaagagtctgtactgattcattttccacatatcgtgatgttaagaaccgattttctctcagtatgttcgtaatacgacacgtgatttttgtacggttgacaggcaattactccacgttttcaaagtgaaggtttggt

SEQ ID NO: 115752 - DNA, 830 bp, Physcomitrella patens
  Intron number 1 from transcript Pp1s37_105V6.1 (locus Pp1s 37_105V6) derived from phytozome v7.0 (chr-ID scaffold_37; pos 548811 to 549640 reverse strand)
gacaacggagttgtggattgagtaaagattttttttttttttttttttttttttttattttgctcacatgtatggtggatgcttgcgattgaaggctcttgggacttaacgtgtttgggcgtagtcaggtagaatcattacaagtcatcatctggtggttggagctgttgttccgaatccttgcggcaaggtggctcattgcacaagaggtgggtagcatttgggaaactcaccaattcgacattttcattggtggctactttgggcgacatgggagtgaacacaaaaagggagtacttgtcaatgctgcaagaggctcttgattctctcaactttcaataaagtaattgtatagcagggtatgatttgggctgctcaacgtgagctgtgccttgagaatcatctgcaggaagaaaaaaaaaaaaaaaaaaaaaaaaaacggttatcagtgaacaactggttgttgtattcccaagagcacatagtctcttccattcctttagacatcgcgtggttcgatattattggaatcgttaatatctactgagaccgcacagattccatcaagatcgtgaagagcttgtattacatcgaatcctttaaatcagacttgaacaatttagtaaaggttttttgcggagttgtcgcagcgacttaattcaaaaattattgcataacacgatccaaaggcggcatacagtaagatgcgcattgcgccattgtatttagtgtcaccaccgacgactggctctttcctattataagtgctacatcgtcgtggaggaggacctgcaggtttttgttgtatcagtggcaaactcacagttcta

SEQ ID NO: 115753 - DNA, 892 bp, Physcomitrella patens
  Intron number 2 from transcript Pp1s60_306V6.1 (locus Pp1s 60_306V6) derived from phytozome v7.0 (chr-ID scaffold_60; pos 1776677 to 1777568)
gagcagattagctgcacgagattcgccacaaacaggtggactgctgacctacaaaatttcagagtagagctaaaattgcaacgggtctttcaagacttccctcgagaaagatgcactactcgaactagtgaaaccctgcttggcaatctatctgtgacctccgaataacgacctgttctactaaataacagaaaaacaaactctcacatgaaaaggattcaaaaaggtcagcccgtgctccacaatgcaccaggcaaatatagtgtttctctcctccaaaggtgcttcagttgagccagctgcagatagtttgattttgcagttagtttgtttcatcctcaactgaaaacttgaaaaggccttagtgctgtacagattcatatcaaggcgccgattgttccttaaatcatcggtctgtggctcaatgtgatggacaaggtcttcggagaggtcttaagacgtatgaagagatactctcatacgtgtagaaaagatcaaggagcacatgtcgaagatagaagatagctcccgcacggatcatctgaagtggcgtaaagatacagagcaagtgggggagcaactccacgcctttggtgacaacatacaacagatagagtaactaagttttccacgcttttccactcaaccaaaaacctgaaaaatctcaccagtaaaagcaacgcatccgattctcaattttgttacggcacacacctagatatagcgcaataatctatgattctaaacggcacagaaacctgaaacattcctctcacagacgagccacgcgtgctgtcagatagcctcgtacctaattctcacacaatgtgagtcaagtgagcaaaccatcagcttgcatgacaagtttttcgaggtgcggtctgaactggag

SEQ ID NO: 115754 - DNA, 559 bp, Physcomitrella patens
  Intron number 2 from transcript Pp1s407_7V6.3 (locus Pp1s4 07_7V6) derived from phytozome v7.0 (chr-ID scaffold_407; pos 61701 to 62259)
gcagcgactgagacgtctaggttttggtgcaagttagtgcaaggatctgtgttatctttacttcaatgggggtttttagatgttgcgtttttggcacaattggaagccctgcggtgccgattgaaacccccaattcgacacccgagggatccatgtttttggtctgaatttccaatgtttctcagacaaagagtttttttctcctccaattcctcagtcatgtaacccgagagctagtgacacgggcagcgtgcgttttggagtgtcttgtttttctacacgaaaggctgcgatcgccatgtagggttcatgagctatgtgcgtaccatacttagctgaattaggggttttagtgtttactaggtcattgccctgtggatgatgtttttttttttgaggaaattatgtattttgtgaagctcctacacatcttcaactcagaggttttatactgagggtttagtcgagtgtcagtttgatttcgttgcaaagtgtcccattaactgttattttcttttctgcagaataccttatttctcaacaacatcttcagatcaga

SEQ ID NO: 115755 - DNA, 617 bp, Physcomitrella patens
  Intron number 2 from transcript Pp1s33_329V6.1 (locus Pp1s 33_329V6) derived from phytozome v7.0 (chr-ID scaffold_33; pos 1950947 to 1951563 reverse strand)
gaacaggtatgaccttcactcaagttcagagtaacattgcgaacaattgaaactcgctcatccatcttcatttctgattatgttccacgcctactatctttcaacagtgaacccaattagaagtgtgtattgtaagaacagcattctgttcgtgattacaaactaggtgggcgttgctctgatttttgatcatcagtgcatgaaaaaccgaagagtttgttttaggctctgcacgttataaagtctatcttagtttagcttttatttttattttgtttattaattttctctctttctggtatagttcatttcagtggcatggaacacttgcctttcttgtagcattcactaataagcttgacctcaaaacattagaattagttggtcgtttgtcgaaatagccctagggattcttctgacctcgttctcgaagtcacgatattctgagactcgtactagtgtcttgtcacgttgtttggtagcctttaacccaggttttgttgcaatgaagtttcacggtatgcatgtggtattgatgtggggctgtctcggaagtaacgtcatgaaattgttgaaatccagagtgaggacttctgcagtatttgccatctgggagg

SEQ ID NO: 115756 - DNA, 858 bp, Physcomitrella patens
  Intron number 1 from transcript Pp1s95_42V6.1 (locus Pp1s9 5_42V6) derived from phytozome v7.0 (chr-ID scaffold_95; p os 281415 to 282272)
aaagagtgtgctgcagcacaaagttcctgagaattgtgagttgcatctttagctccattagggaacttggaactttgagccttggcttgttgcacaagatagatttgttggtttactgtttttttgtatttagatgacgtcgataggccttagagcctcttcgcacttcgtctaaacggagatcctcactttaattcttagtacattttgtattccgtcgggatatgcgtacaacgtgagcacaacgtatcacgctcggatggtttacttacgctgtgtgtcatagctatcgtgaatgagcaacaaggtgaggagtgcataatgagtatcggcgttattgtgtattgaagagcagaagagggcatggcgggagcaaagaatcactaacactataagtgccgctgcagaatggacttttgcaatgaattgtgtagatcaaacagatagcttgagaggaattctgattgtcttgacagcggagccgattcaactcgctgcaacccaattgtcagattcttaacttaggaattgctgttactggttgaaatgaagcttacgcagtgctatgttctccaggacgggttcatgagaagttcagaagtttttgggagttaattgagataatccatattcttcaagagagtcatgtacgaggaagatcatatagagacaaattcgaattaccttcctgaaaccgttttacgacattcagaactggagaatctcacagacgacaaggaaaataacacgttgactctggtggtacttttaacctaggaataccacagagctggggacgtaatatttgtatagagcgagaaaaattaacgttaatgggatcaagggtcaagtgctgtt

SEQ ID NO: 115757 - DNA, 715 bp, Physcomitrella patens
  Intron number 1 from transcript Pp1s199_90V6.1 (locus Pp1s 199_90V6) derived from phytozome v7.0 (chr-ID scaffold_199 ; pos 515884 to 516598)
catttgagttcccagttttcagacacagaatcgtcgccaggtgatgtttccaatgctgcacttgtgttggtgttatttcgtgttgtctctttgagttgttgtgttttttaattgagagagagagaggagtgtgattttcatggcattttatttatttatttgtttattttttgattttattgtaggacgggtttgtgaattgtataggcgtttgtcgaactgaagcacacgactagctgaagctaatgtgtagggtttagggttttgatgatgatggtagtcgtggttcaatgacagtgttaccgagaagatcgagctgataaggaaacgtgtgagagaattgagctgtacagtgtcgcagatgtcagtttggttagagagtgaagcccgcagcagtctggcagaatcgacttgtccttccaatgaacggtgcaagttttgagtgatgtgttggattaatgatgcgagagaaaaacagccacttcacttcatttgttgctatcatgaatattgttttccatacatctaagttagataaatgtccaaacaattcgtttttagagattgagagagctattaggttgatagtttgtcttgcgtggcgcagggaattttttctgggtcagagttggaccaaatatttgcattagcaagttttctgaggttttactttttcttttcttttcttcctttcagtgtgtttccagttcagagg

SEQ ID NO: 115758 - DNA, 916 bp, Physcomitrella patens
  Intron number 2 from transcript Pp1s285_26V6.1 (locus Pp1s 285_26V6) derived from phytozome v7.0 (chr-ID scaffold_285 ; pos 276722 to 277637)
gttcagcatttccaaggatagttcgaataattcaggtatgagattttttttcttccttctgtcacagtctcgttatgtaattttagctttttaaaagttcgcaatgaatgtctgtcctctaagtttcttttatatctacgcctgtctttgattaaattgtacacgaaaattcttttggacgaactgacctgactccgaaggaatgcctgggacatgctaagtctgctgacatagcatcaattgctggttttagggttgagtaacttcagaattcctggcagtggtattttcaatggaaactttgcgtgtgtttttctcacaaggttcagggtgcgatggtcctaatgagacacacattattgcaagaagggaaacttcacttttgcacttgaactttagaatagagaggtgcttttttcagctcctcattgtccaacctcaaatttgtagccaatcatcttacgtatctttcagtgatagacatgtatgaaagtatgagctctcttgtctgcagtcgcattttggcggattttgactgcaacattcaaggtgtaatcatgaaatgatgatcaagcatttgtggataggagtgtattctgtctctgatcatcattgttggcattctattgagtgtctatcctggaatttgaatttctcagcatcggtggtggagtctattgcattgtaagtgatctctagatacgaagtaatgaatactctcttcgtaggtaagaatacgatgagacagtgatggataagtttctctcgtgcactctgttgtacgtcatcagttttgctttaatctacaggtcatctgatttagatgtctgggacctattttctagttgaaattggattcaaatctaattatgacttgtttttattgtgcagtacccaagcatttatctaccttgga

SEQ ID NO: 115759 - DNA, 463 bp, Physcomitrella patens
  Intron number 2 from transcript Pp1s59_361V6.1 (locus Pp1s 59_361V6) derived from phytozome v7.0 (chr-ID scaffold_59; pos 1863804 to 1864266 reverse strand)
ggacatcatttgtggcaggcttccaggtgatactccggagtggtgaaatttgctgtgctttttggataagaaacgcataattctctgttatttgcgatttgtacaagtgaacgcataattgtcgaagaagaattcaacgtgttaattggtcactttgtttgattacgtcatttgggatttgttaaaaaaattaagtcaaattgtgaagttagtgcaatcagaataaggtatgctgccaagagttacatattatttaacattttttttaattaattaataatccttggaacgcaagattcatgaacatttagtttttgattctcctgtgagaatgaaacatattctacgttcaatcttaattttcagcacaaacaatctatgaactatgtggtgtcatgtatgatttttgtaaattctctggcaaacaggaccgacgaataataatctacaacgtcgagaacga

SEQ ID NO: 115760 - DNA, 723 bp, Physcomitrella patens
  Intron number 1 from transcript Pp1s33_84V6.1 (locus Pp1s3 3_84V6) derived from phytozome v7.0 (chr-ID scaffold_33; p os 509303 to 510025)
aatacgtaagttgccatgactccacttttgatgatgcatctagtagaaattcaatcacactacttggcgagggctggttcaactcaacgtttggcaacatgatttgaaatttcgagtctcgccacagggaatgatcatttagttttgacaacagtttcgcacagctccgtgattgaacaattagccccaacgtattatttgagattcttggggccttattctgtggcggtgcttcttcttcgttgaacccaggtgacgagttggttgtgaaagagtgaaagttacagtgcttagtttcttgcctctggtttaaaggacatccgggacgaagagtgaccctctgatccgatgaagtcacgagtgtgagctagtggaattatttggatagctcaattcgctaacaagttgtttaattccatacctgctgcattgcatacactactttcacggaatgagtttaaaattaactgtagggaatcaagtagtctagcaataaacagctgcctttagtaaactcattgctgtgtaaacatttctaattgatttcaactttgagaggttagttgccttggctaagaaacagcgataaaaatgcacgttatttgttgcgacggtaagtttgcctgattctttggggtcttccttcacccctggtatgaattggatgttttccttcccaaaattgcaggttctgcaaaccagagaaggtccagattatatctt

SEQ ID NO: 115761 - DNA, 850 bp, Physcomitrella patens
  Intron number 1 from transcript Pp1s155_49V6.1 (locus Pp1s 155_49V6) derived from phytozome v7.0 (chr-ID scaffold_155 ; pos 394382 to 395231 reverse strand)
agcgcttcatcctcggcgcttcatcctcgacttacgtactcctttcccaagcatccacatctcatcgtgtctgcagtttgaaactggacgattcctcatgcagttgcgtcagaggatgcagcatcgctaacaaccgcattaactcatcaaaagctttttctctgaacctctcaggtttcctttccttttcggtctcgtctttctattcaacagtgactggagcttcaaccccctttttttttcgtttcttttttgtttgtttgtttgttttttttttttctatgctggaagaattctgacattttccgtcgaaattttgggtgttccttttgtgtcttctatgcaattcaaactaaacgttttgattgatgatctcacaatctgtgcgtctggaatcgtgacctgcaatcgttggggttctatcatgcaacatcgggagtaacattcctccaggtttagggtttttgtattttattttatctttgcagaatgacgttgtctttgatgatgagagttgccttcgagttgttcatcagttaatgagtttctttcacatcgtacattcagtgacaaattgtttttgcatcgtctttgtggtttggtaatcaaatttggtattttaagggagttcatgctcaagagagtcgaatactcatttaattctgtaatggatacgagcaagttaaatcattgatgtacaaactacatatgatcctctcctgttcacatctgctctttcagagtttctctttgtgtgtgtgttttaatgtgatccatgttagtcattgtgtttatttctttttccccgtttgcagtcatcgatcggttctggcaaagttagcgcacctta

SEQ ID NO: 115762 - DNA, 1002 bp, Physcomitrella patens
  Intron number 2 from transcript Pp1s18_231V6.1 (locus Pp1s 18_231V6) derived from phytozome v7.0 (chr-ID scaffold_18; pos 1751189 to 1752190)
gcctatcaacagcgtctggaaagatccaccttaaggtatgcagattcagagagaacagtatttaccttttcaatcttttgaacgcgagtgatattgacttaacatcagttttcaaggtcacattgcctcctcggatgtttacattgcgagcacaaaccttggaagagctaatttatccgtgcattcaatcgtgaaaatatgttgaacctgacaaaccgtgtattcaaccgtggacatacctggcatatgtggttggaaagacggtgctaagatctccggggctagccgaagttcgtcgttcgattgtgttttcaatagtctggtccgacactccactgcgagaagcgctcggagcagtttattttctaaccatctattgtttgacttttcgacagttgtgttagttgacctatgaattgcgttcaacgccgtggtctgcttcgtagaggtcaggttacttcgtcagtttagtcgttattttgaactcctttttacgtgttaattttgtggcattttagtcttttattcgtcttgtttttcttaactataatttttttggtgtcagtttggaagaacccgttgtcgcctataattagatgtgcttttgtttgtttatatattcatttgtttcttattttaagatgatttatccgaggtttggccagaaattgcggtttaaactccattttgaatcttaaagtagctgcattttttaatatttattttcctgtcggtgttgtggtaatgtcaatttggccatacatgcacaagtagagtcagttgtctctcaagtgttgtctcaaaccgaattttgtgccttagttgtgtgcgtgagtgggctcagattatgtaagtcgttagttcgacttgttcccgaaatatgtcgatttctttgattttgtgatgattcctccgtgtcgttctgctgtcttgagaaccatcttactgacgtgtgccgggatttccgtcaattgtgtctatgtctaggtggcttccctacgc

SEQ ID NO: 115763 - DNA, 513 bp, Physcomitrella patens
  Intron number 1 from transcript Pp1s58_150V6.1 (locus Pp1s 58_150V6) derived from phytozome v7.0 (chr-ID scaffold_58; pos 792749 to 793261 reverse strand)
gcttctcacggcagtcatcatcgctcgcgttccttgtaattctatgctctttcattccttgcctgttgtccgcgcaaagtagaataccccgcattcatattatacttgcgatgtcatttctgagctgtttgtcttcttccctcttattttgttttacgtcgtttgtatgatgactgatcccaagcgcttacacttaggttacactggctaggattgttgtgaggaaaattggaaatttgaaggaatttgtatcagtaaaatttgcatgcatgtggagaatctttttctttgattacgtgattttggttcttccgacaagaacttaaggaaccatgggttgttgcttgtcgactttaatcgaagcgaatttatcctttatgaatttaaattgttattgcaagtgtagaggaagtagtttttgatgctggttcgtgtcttatgacgttgatctgaacttgtgctttgtattttcgtgtatgattcttgtgactttagacacgaagattgattggg

SEQ ID NO: 115764 - DNA, 607 bp, Physcomitrella patens
  Intron number 2 from transcript Pp1s277_24V6.1 (locus Pp1s 277_24V6) derived from phytozome v7.0 (chr-ID scaffold_277 ; pos 133487 to 134093 reverse strand)
gtattctttttgggcgccgctgcagtaagtgttgctatctccaactttgcgtcgcttatagcttcacttaattggagccctaaaccatgtaggcgatcctgaagcgtcgacatctgaggcgcctcaaattaccttgagtctctgtcacagtttcaaaagcttctgcatcaagctctgtatagaaacctgcgtgttcgggacttggttggattttttctgtttcgtaaccgttacatactagattttcgtagtcatctttttgttcagatcagctaacactattttgagccgtgctgaatttttattatgaacttatataggagcacatctatgcatcttgcttcttatctagtcacagttaattctcgagcctggtactcattacgaaatatgtagcacatatcatcattatttctgctcatcttaagaaaaaatagaaaactagcctttgggacgcagattgttagctgctgttatgatctctaatgttgaagttatccatttaaaagatgaggttttcaggaatacgggttgtcatgcattttaatctctgttgaatggtagaaaataaaagcaaaaattggttgtctgtgtacaggttgggaat

SEQ ID NO: 115765 - DNA, 913 bp, Physcomitrella patens
  Intron number 1 from transcript Pp1s145_47V6.1 (locus Pp1s 145_47V6) derived from phytozome v7.0 (chr-ID scaffold_145 ; pos 248263 to 249175 reverse strand)
atagaagagacacgaagttagaggtactcttcattccttttaaccagtcagtttctgtttgcttctaatgaagtcctaatatttgatgaattgtttgaggagatgtctctgatcattgtgagtgtgacagaatcacaactgtaaacataatcaaaatacaaacataactgatgagcgcgtttgtgacgagtcatcaacaacattaactatgttacacatcttctccttccgctcaattttatctttagaaaggtaggctgaagagaggaagtattcttctgtttacatgacaaaaagacctcatcagttgaacaaaccaactattatcagctgtacaacgcggcaatgagttgtactgtgtatttcagagttttgcacctggttggacactcaattgtgatggagcttaatcgattcaacatgcgatctcatgtcacttttaaacatacctcaagaaattctgtaaggagagatatagtaccatcaaattctttcaacatgtgattgaaaatcgtagcactaacattttgtaagagcactcgcatctcgtactcgacatacaacaacttcttacgatgttggtcagctaagacggtcacatatctacttgcctcctgaccgctacagaactagctaccacttcgatccactccggcatcgaaccaactaaataaagagggttctccgccttcagcccacagcgtaattggacaatgatgaactctactcttagatcggaacgtgaatccacagagagaacatatcgaaaatttatcaccatggaaaatgcagtaccaaacgatgcccgctgaaacagacaccacacgtggcgtatgtgacctgaaaatgaagtatactttcaaggcctaattgatgtattctgtacggtaacaggatcccctcaggaggtggc

SEQ ID NO: 115766 - DNA, 790 bp, Physcomitrella patens
  Intron number 1 from transcript Pp1s2_318V6.1 (locus Pp1s2 _318V6) derived from phytozome v7.0 (chr-ID scaffold_2; po s 1596172 to 1596961)
ttggcattggtcaacaacagcaacaaccacaagaggtccatatcatccaattttaccccctccaaatttgcatgttctcacccattcacatccccacattcgagtttaagtctgtcaatgaataattcaattgagaaagtccagagggtagggttgtgggtcaaccaagtggaaagctgcaagttttagggtggaatgagaaactgtgagaggaattactcaaacccacagcattgaatacatttttatatgaatagataaacaaacaatgcaagagatttttttattttcttttctaatctggctttgttacaaaacatccataaccaaatctttcaaatgaatgtcatctaaaatacagtgtgcaatgcaagcgaccctaaatcctgaggtgtagtaggtgagttctatggataaactctatcatctttttttaaaaatcttctccaggcccaacacctatgcatagcaccccagcctttgatactgtagccagtactctctattgtactacacacaataattttaaactacattatattcacctctccccaccccctccttgtcctatacctacatgtccatgcactcattcatctatatatatatatatatgtatatattcacacacactcgcactcacatatctgtatatattatattcaacacacacacacacaaacatgtaaataaataaacaatactgtaccccattcatgtattcagtattagtcaactccaatccctaatgcactgtgcagattgccccttccaagacagaggagaaggg

SEQ ID NO: 115767 - DNA, 578 bp, Physcomitrella patens
  Intron number 2 from transcript Pp1s197_99V6.2 (locus Pp1s 197_99V6) derived from phytozome v7.0 (chr-ID scaffold_197 ; pos 397018 to 397595)
gaaagattgggagagtccttctaagacccacagtaaaaaaaataaaaaaaaaactattggagctacagctttctcttgacagcagtagtcgctgaattttctttcgctatcgtgccctgttgttttcaagttgctattaagaagtcgatgaagcgaattgaaaattttggatgtttaatccctgaaattcattataacatggaggtcccgtttctcagttcgttgcttggtatcaggagagcgaagaggggctgcaagggagaagactatgtattactggagaaaattttcgcctcgtcttcagaatttgaattctgatgcttacagtcactatagtagcattcaagcttctcgatcatcccgaatgattttaggatgtcatcagttttgtaagtcaggcaagcatgaactgaaccagtttcttcccgctgttaaggcatcctgtctgtgatttgcacgttgttctctccagacgtgaagcaatgggcttgcttagtatgtaaatgatcacacgctgataacatttgttacaaagcaagtctgcgaccgtttaacaggcgtatcatgaaaatatgcag

SEQ ID NO: 115768 - DNA, 444 bp, Physcomitrella patens
  Intron number 1 from transcript Pp1s53_242V6.1 (locus Pp1s 53_242V6) derived from phytozome v7.0 (chr-ID scaffold_53; pos 1679055 to 1679498 reverse strand)
atcgttctgacattaacagagatttcattaaagcggtgcggatacgctcttgtctttggattactttgaggcaacgatctgatgcttagggtgaagaatgagtttctgcttgtgagggtagtctttcaaagttggaatttgcagttgattcgtctcactctgtccggtggccagtgcaacttagtggtggtgttctgcgagagcttagttaaaatgcggcattgcgtcaagtaatgcatgtcgtggccggacccttgttcattacatgaaatgtttcgttctttttcgcactaatggttggattgagtccgtggtgcgattgaatgattggttttgagcttattccagttttcattgccggtgttaagtctcgggtagcgtttttagttctgaatatgctggaagctggttacagagtttcagaggagcatcgaggtagcagca

SEQ ID NO: 115769 - DNA, 864 bp, Physcomitrella patens
  Intron number 1 from transcript Pp1s6_424V6.1 (locus Pp1s6 _424V6) derived from phytozome v7.0 (chr-ID scaffold_6; po s 3545148 to 3546011)
aatcggagcttcatgtgagtccaaatacttcatcagtacttcactctttctttcggattgaattgtagagttttacccttcctttcatcatggtctttctgacctttgaccacgctcctacctcttgacaagtagatcaaattcgtgtgtcagggttttgtcctcggtgagtggattaatgattgggaagtagatgcttcagttgtcgcatgatgatttataagtgggagtatgatagttggaattttcaagcgagcttgtcgttttagggttgacaattatacttggtcatggttgaactttacctaccatcaattgacagacgccatcactctttctaatgttaaggtttgcattttactgtggatctgttgctgcaacttcatctttttctacagtttcggttacagagtctaaacgttacacatgaatgcgattcgaatgttcattttataaagttctctagtcttctaagtctaagaaataattgtttaggtggtgaatgaagcagcatttatgttcagtacttgttgattttgtttccaattcctcttgatttagttagttcgtttaattttattcctttagttagcactgcttcttgagacaagtcagcaattattttagtgcgtcataactgtgtcatatgtcgtcggatttccgaaaaccagatctaatgtcttttgttttttctgtaaagaatctttattcaaaattgatctcgcaagttgttactgggatgttaacaatgtaatagatgttcgttcaagcatcacttgaaaggacatcctatgcacgaactgattgtactggaagtaacgttttacagggcgcattttcacttctcggttcattcctcttgcc

SEQ ID NO: 115770 - DNA, 779 bp, Physcomitrella patens
  Intron number 1 from transcript Pp1s290_16V6.2 (locus Pp1s 290_16V6) derived from phytozome v7.0 (chr-ID scaffold_290 ; pos 292267 to 293045 reverse strand)
cgacctctgcctttcaccgtgacatcattctacaggttcgatttggttcattaagctattgcagtaatgattatatcagtccagattgcagttgctgctattcaatggagtacgcatattaaaaccgtagttcagtaactgcacgtcgaatgtatgctcttcttgcattcagtccctgtgctgttcttcttcggtgtgtcttgctgtttggaatcccgttcctaggcatgcaaattttcagcgagccagttccctggcttgtttttcctagttcgtctctaaacttgtttcgagacaattaaacgtgtttcaaactcgttatgaattaaatgcggaacatggaggataaggaataaaacaaaaggattcgaaacacgtctcagagactagaattgttacattgtttcgtcctccagtttctcctctgggatgtcggacagcattagatgacattgctcaatgcagcacgcagctgttggatcaaactgcatatgttgcagatgtctttgtgttcactttctgttgctcacgttgcgtggttctattaacgttctgaatcaagacccgacttctgcacgcaggtgttgatgtagcgtgtggatgctttcccccacaacattgtgaccctcgccacgaggcccccgccgccatgatccccctcataccatgagctgtcctacggactcatctacgtagcgaaaggatttggtgcctcgataaaatcacaatcgtagaaacttgggagctaatcccgaaaagagctggtgagatattcgaag

SEQ ID NO: 115771 - DNA, 613 bp, Physcomitrella patens
  Intron number 1 from transcript Pp1s115_90V6.1 (locus Pp1s 115_90V6) derived from phytozome v7.0 (chr-ID scaffold_115 ; pos 583545 to 584157)
aaagtggcagctctatctacgacttcgttgtaaaggtatgggtgtcgtttttcttctccttgttaattgaatgagtgagtctctcttggctgaatcgaattttagcttcatgtggatcaattacgttctttcgcactccgagctttgcattttttgttggcgttggatgaagaagatgctgcgtgttgatttcggtttttagtctatctttttccttgtttgattgttctgtcagctgaagttgtacaacactggtagaatatgcactagttgtgtgaggacggtttagaacgtcgacttttcacgttgttaagcgaatttttggagcataaatgcgtaatgtagactgagttacgattttacaaagttctcgagtggttcaattctttttctttttttcttttcttcccttttaattggcttctattcattgaggaaattttgtttcagctcgtcatctcgaaccgatgttctcgttttcaagtagggcacagcactgcgccagagaataaccgcattttattgtaatccttgataatactgtggcattaacaacaactgtaacaattacagtaacaataacaatgccctcgtgaatgtgtgtaggatattg

SEQ ID NO: 115772 - DNA, 663 bp, Physcomitrella patens
  Intron number 1 from transcript Pp1s173_78V6.1 (locus Pp1s 173_78V6) derived from phytozome v7.0 (chr-ID scaffold_173 ; pos 483291 to 483953 reverse strand)
acaaattcaggtcagggtttttgagatgcttggtgcagcttgacaacgtatatccagtgagaccacaatccttcaattcagaagctctcccgaagttccgtgggagctgacttggtttcaaacttttgatggaaatggagctgctccccatgggcaagcgtttcgcatgcattcgtttatccaaatgactacacaagtcgtttgtagttactcaattgtcttacagcactgaagatgtcgattgcttgacatgttcccaattatttataacaactttcacttcaaaccatagagtggtatttcgtattttgctctctctggccctctatattttcttcaataagtttatgtacgtggatcgaactgtgaagctttttaacccggaaagacaagatttacccgcattccaaagtttggttccttcaacttatattagattataatgtaaatttctttcctttctatttatattttttgttgtgtttttttttggtttgatttggtttgttggagatcctgaccttaagtacgcaaaatgctaaaaactcctaccaagcataatgcacttcacgacagctcataggaaaggacatcgcttgggatagagttctaaacctcgttggaaagcacacgagtagtgttgccctattcgtgtctgtagaa

SEQ ID NO: 115773 - DNA, 608 bp, Physcomitrella patens
  Intron number 1 from transcript Pp1s84_138V6.1 (locus Pp1s 84_138V6) derived from phytozome v7.0 (chr-ID scaffold_84; pos 787361 to 787968)
actacaagggtggtcaccctgtgggctccgatcaggttcgtaactatttccctttgaacctttgcttctgtgtaaatcttgtgggtatatccagtttatgtccgatcagtccttcggggtatacttgtctgtagtgagtttcttttcatattttattccgagtaacgagacccagtagtttttggagaatgctgctttgctcagctctttagccaagtttgtcgcagtagagaaaatgaaaaatgcacgtaatttaccttacgtgtgaagttccagtatcaattgacagcctgggtcctttcatattagtcaaactggaccgaacgtagtgttcgggttgcgctcgttgtcacccgagctgccactccattgcatcattttgatgttcggtcggggacatgggttgggctctgtcgtccttcgcgttatttatttttgtcacatacctctaattgcgagtgttggagtcgagttgaatgggagaagcgttgtctgacttcggtgattctgttgtatgagcacaccacttcatgaacgagagaaagttgctcacatagttaaaaatgtgtgcaggttgacgctgcacgttaccgtatcgcggaaggcgc

SEQ ID NO: 115774 - DNA, 740 bp, Physcomitrella patens
  Intron number 1 from transcript Pp1s71_136V6.1 (locus Pp1s 71_136V6) derived from phytozome v7.0 (chr-ID scaffold_71; pos 774411 to 775150 reverse strand)
ctctgccttgaagcctgccctatcaggtttcttcttttgccgtttgtaaatttcagttgccattcttgcatgctagtctggtgccgagacgcgttatgttgtggtgcccaatgtgggtatgacttgtgcttttgtagatttgggttaaattcgtttcatgagtactttttgtcactagtagggtgtgaagggatggattgtatggtgcatcaatgcctattagggttggcctcttatacttttgaagttcgtcttctcttgttcatgtactagtcttggttaaccgagttctattctgaaatgaactgcattaaacctagattgaattataaagccttctatatatgcgatgaactcacttttatttctcgcctgttgatttgaagattttttgaactttaatagatctgattgtgggcgttctgatagtgaggttcagctttgcccttgttcacttagaagagcggatgagatgagttcagtgttgtcaataggaaacattatttgtattcagctgattttcccgtactagaatagaattgcacaatgtgagagagcaaaaaagaagaagaaactattttgtttctcatttttgctcatatctgcttcgcttttgcacttcttatttcaaactagctcagaacaggccgccacataagtgagttggttaaaatgccactgacactctcaattgcaaattctcaggcgcttgatattgcctccatcgacattatcattgc

SEQ ID NO: 115775 - DNA, 803 bp, Physcomitrella patens
  Intron number 1 from transcript Pp1s79_64V6.1 (locus Pp1s7 9_64V6) derived from phytozome v7.0 (chr-ID scaffold_79; p os 375429 to 376231)
gttgtcgtggactgactggctgttttgctatcctggtgcgcttcggagggttttttgtattgtttgctgttaggaaatcgcggagatggggaagcagtgcaatgctatggaggttcgggttgtggggttcgttttggtggctctcatcgcagttcagttggttgcagctgaggtcgtcactccggcgttcgtctggtccgaccttaggtatagcgttttgtgggtttgattgcctgagctgatttctgtttccgtttagatgcactcatctcagattcggaattatgggtgaccacaaggcgacccgattttggatttagggtagtggattgtttcagaacactttaggcccgaagtttaggggtttcctattcgctacgctcaccgtcgatattatttctgaagaggttgagtaaaatcccagatctagtgtgtgtttggcctatttttgtgtcagaatcggattgaattctcagcaggattatggtggtttgtttgtttgatttgttttgttttgttttgttttgttttttttgaggtttcagatctctatcgctgttatgtgttcgtggtgtaggattttttagagctgtattgtgaaatctggttattgttggatttttcccatccaatacgttagaatttatcaacaagctgatgccttgtgaagattctgttttttcctgggaattctgggttcttcaaatgatcagtaggttggtgctaattcctaaggctgttattgaattgcagctgatcagggctttttcccaattgaatgttcttgccgtgtttgcttgcag

SEQ ID NO: 115776 - DNA, 670 bp, Physcomitrella patens
  Intron number 1 from transcript Pp1s49_216V6.1 (locus Pp1s 49_216V6) derived from phytozome v7.0 (chr-ID scaffold_49; pos 1696080 to 1696749)
aggaggagggagctcttgaatccgatcccagccaggtttgtcgatcgactattctactgcgtttctcttggcgatttaactttggtctgtaggagaattgcgaggcctgagagaggatttggccggattctggtggttagttttagtagcctggttttgatttggttgtgtttattttcttccggaagcgagtttggagtaggttctcggcgttaggtctattgaagaggttactgattaattggaattgatgtctagaagcttagatgagaggttttgcgcggcgtaattgcgcgttgagtgcctattgttttgaattgtaagtgctgtttcgatttgcaaattgtcagtgagagaataaatgtatattttttcttatcgtttgaatgtaattctagcatctgtatgcttcggttacgatcacgtgtttgaaccgagaactatgaattatggtgaattctggttttccgctggagctggaagttgcggacgtgatggttagaaagatgtctatgagctgtagagatttgtaacaactctgtctagaatgacatacttcaccgtgtccttcagaatgcgagggtgtaaaattaagcccgcgtttagaactaatctgtaacaaaccattcatccagctctccagaggagtctgattattcttaaggaaggt

SEQ ID NO: 115777 - DNA, 766 bp, Physcomitrella patens
  Intron number 1 from transcript Pp1s221_90V6.1 (locus Pp1s 221_90V6) derived from phytozome v7.0 (chr-ID scaffold_221 ; pos 725830 to 726595)
accattcgcgtttcttttgcgaagagcttcgtcaggtatgactccagtcaagaacacccaacaagactaatttgctcccatgaatgatcattcatttctatctctccgaaaattcattgaagctgactgcttattatgggaggttccgaaaaccttgattacacttgaattcatccgtggcgattgaatgtaacatcgactaacaatggactgaatctaacatcttgggcttacttcgcttctgtggaaagcgtccagcgatcttttctgggtccagtatgtcttcacatcccggtgtacgaattttttttttttttttttttttttctttgtaatgtttagaaatgtcctgaactgaatcccatgatcaagaaaaactagttttttcttccaaatctttctgaaaggtatctcgtgctgcaggatataccccggaaaaatgcaattttgaaccacgaaagcgtccatggttagtagcgtagatgtttctccgccgttaagaaaagacaataatgcagaagagctgcagtgtgatgcaatgattatttgaatgtttcattcgctcctgacattctgatgatcgaaaagtatatttgcaagttatttagcaagaagttagcgaatgttttgtaagtaaaattcttggagtagcgattgtttttgaacgaagttattgcgttacagactaactcgtagtttatgtattttggatggaaaaccttgattacatgatacacgttcagagaagtgactgcagtgaagaagg

SEQ ID NO: 115778 - DNA, 406 bp, Physcomitrella patens
  Intron number 1 from transcript Pp1s123_98V6.2 (locus Pp1s 123_98V6) derived from phytozome v7.0 (chr-ID scaffold_123 ; pos 703421 to 703826 reverse strand)
acctcatacgagagggaggggttctaaagctggaggttcggtccatgattttcccctcaggctttgtgatgaattgttttttgcaagacaagtgtattgagaaaaattattcatttagtggcgacagttgtgggtgctctggtgggtgagtttgttttgcactttgtgggtttttgatatgtttgaattttagtgacattgtgacatggtcggcgtccgtgcggtgtgcggtgggtttggaacgagtgtttccgattgtgcagcatcggtccccaatttgaagaacattgtaacaatccctttgccgttttcagaacggcgaaatttgaccctaggagcgttttatccttgcaaccctgctgctcgaatcgttcgtcgctgctttgtggttacatcgtcgtcaaca

SEQ ID NO: 115779 - DNA, 1006 bp, Physcomitrella patens
  Intron number 1 from transcript Pp1s38_350V6.1 (locus Pp1s 38_350V6) derived from phytozome v7.0 (chr-ID scaffold_38; pos 1989640 to 1990645)
acgatttgcttacaaaagggtgcgagcttttggacattgtgtgattcttgggcttagtttgcttttggaagagaaaaattcaattcttgtcacgctttgctaaatttgggctggattcaacggatcgcttttgcagctcgaattcgttgttctgtaatgtttaggaagtgtaaaattgagcagatttagcgccagctttgtcgtaagtttttccgtgctttgtcgtgtgtcattctaacactgttagagatagatattgtattcaaaggcctgcattcaaggccttgactgtgggtttgattctcctggagctgagtagtattgttgttcagatgcttttgcataagtccgatggttcgatggctcatttggattggggactgatcacttaggttggagatcaagttaatgtcgtcaggagttccaataatgtgagttttgtgttcttttggtacctgaggtttgtgtgtagattcttagggctacacctactgaaaatttgttgaaagccaataacttttagcaaaattaatgatggtgaaatttataaccttttttttctttttaatgatgagctcggatttttttttattatttcttaaaatgctctgtgagtttgtactgaaagcatcattttctacgtgaagaaagtgacgaagtagcgaattaatggtttggatattctggaatttcttcgattcaagaggggtgtttttattttggaatttaaagctcaggggtagttctcagaccttttggctgtgaaattctggctaaagatgttaaaaattatggtttaagtattgttttcatcgatatcttttgtcaagtcagtgattgaccacataaacaccatattttagtttctatttgcctctgctgtacgcgatggctgaggtctcaacgtgagtatggagaggaatatgtgttctttcggaagtttctaactatctcgtgggttttgtgtacagatactacacaagcagagttttcattgggacacctg

SEQ ID NO: 115780 - DNA, 262 bp, Physcomitrella patens
  Intron number 1 from transcript Pp1s36_225V6.1 (locus Pp1s 36_225V6) derived from phytozome v7.0 (chr-ID scaffold_36; pos 1461495 to 1461756)
ggcttcagactccgctcgtgtggctctgaaattaggtcattccttttctatctctgcaacctactgctttgaatgcctttcacgaccagtcttttgttttttcttttccctgtgatcggatatttcgagagcttattttaccggtgccatctatgttgataccaatatgcaatgtttttggatgacgatgtaaaaatgaataatctcttagaagcctaatgtgagtgaattcgttcattacaggtaattgtgtagctgcaag

SEQ ID NO: 115781 - DNA, 739 bp, Physcomitrella patens
  Intron number 1 from transcript Pp1s200_32V6.1 (locus Pp1s 200_32V6) derived from phytozome v7.0 (chr-ID scaffold_200 ; pos 229052 to 229790 reverse strand)
ctcaccggcgcaggttggaaggatcagttggttaaacttaatcaagtatcgcatgttgtagtgttttgctcttcttctcaagccgctctctgtccacttagaatcgcacgtgttagtgggacgaacagatcgtcacgtatcccttcatcacagtgtggaaggacgcggtcacagccggttccagatccaaatccaatcgtgcaccacaaaacatgaacgttagcctaaaaagaaaaaaaggaaaagaacaggtgtatggattagggctcgctgcgacaaattgcttgtgcaactcctcgtgggctgacccactgatgtacttgcgtgttgtttcgaggcggttgtgtgcttcgtgtctggtttgattttatcctccaattcctcaatggaagtttaggtaactgtcccctttgatgatccaccccttcttgtcggttaggatccgatcatcggaaggtgattcaggagagaaagcgcaggtcgcctgggaaaaattgttatgcgtgatgtctcgccagctgttttgtatcaaaacaatttttccaccttcgaagaaatctttgtcaagacggtgacactaccccatagctcagattgatcacttggatcgtatggttaattgtcttggtagagtgagaaatcttttttcagcgttaacttgattgccagtttcttaacctaattttgcaaatcaccttacgcaggtgggtctcctcctgacgagagccttgccgcagcc

SEQ ID NO: 115782 - DNA, 620 bp, Physcomitrella patens
  Intron number 1 from transcript Pp1s109_183V6.2 (locus Pp1 s109_183V6) derived from phytozome v7.0 (chr-ID scaffold_1 09; pos 1076635 to 1077254)
acttccctcaacttcgaagaaggcgtttatatcaggtactagctagtttcgattctcaagatcctacgccctgttttatgatcctttgcatgtaagtgtagcaaccattgcaaacatctaaggttgttaagatgtgttttgatcgttgaatgcctgttggccacgttggtgaattcttgtcagattatttaaacaggaatttaggtcataaatgaacgacacgtcaggggtctccgacgacgcttgaggtctagttgtatcttagatagtggtatctcataagcaggtccaggccctgcaactatgcggtgatttggtcatgcccgagtgctagcaacagtgtatcaactttttgaaagtgttgatcatgatctgcatgtgaattagcaagaaacggagaggacattgttggaactacctctgagtgtgtggacaaccgcgtctgatttcaagaacattttccccgacctattctatcgttgggctcatgttcatcagtccgctggagtctctcggattccgctgacggtatgtaactgtaaatcagaatgatggccctgaattttcctgcaatcatcgaagttcgatctcttgttgacctgctcactgtccctctgcag

SEQ ID NO: 115783 - DNA, 521 bp, Physcomitrella patens
  Intron number 1 from transcript Pp1s398_6V6.1 (locus Pp1s3 98_6V6) derived from phytozome v7.0 (chr-ID scaffold_398; pos 61082 to 61602 reverse strand)
gattgcatcctagctaagtaagatgtgaagtcctcaaactgaaattggatttttatcaaatgctgcatacgttctgttcttgcagagaaatgcgaataaaaagataaataaagaggaaaggagaaaaaagattcacacgcctaaaaaattcataatggtgagcatcgtatttatgccagatatcatggtgactagggacagaaaccatatattgataatctccaaaaaactaagattgtacattattcaggttttctcataaaccatgattgtggttcatcaataattctgtatccaacaagatgctcaatacagcaaagttgcattaactttgtgtatcttcaccaacttggatcacaatcatctgttcacaggtgctgagatattcatgacaacgttgtaattagttttctgcaatgttgacagagttgcgcaaaattgtttgagtttttagaactagtcgtattgtagctgtgcctgtgcatagcattcttactgtgttacgcaggggcacactgaag

SEQ ID NO: 115784 - DNA, 402 bp, Physcomitrella patens
  Intron number 2 from transcript Pp1s317_18V6.1 (locus Pp1s 317_18V6) derived from phytozome v7.0 (chr-ID scaffold_317 ; pos 130817 to 131218 reverse strand)
ccacacattctacattctctcaggtttgtagctaaggacgaacttctgagactgttctgtattgctgcttattaccctatctgagcacgaccacgaaaatgtgattatttattttcaatcttcaaagaatgttcccagtagtgtgcaatgtttggggtttatggatgaataccacaacatgtccggaggctgcgttaatagaacttgcaataatttgactttaaatgtagttcgtatcatgcaatagatgtcgccagaggataagtttgtatagtcctatcattatcttaacgttctgcgacatagtgatgcatgtagaacagccatttaatataattattgacattttaagatgcattgggttttacagagaaatcaaacgccggcacgaaacttcaagaa

SEQ ID NO: 115785 - DNA, 957 bp, Physcomitrella patens
  Intron number 1 from transcript Pp1s70_278V6.1 (locus Pp1s 70_278V6) derived from phytozome v7.0 (chr-ID scaffold_70; pos 1699182 to 1700138 reverse strand)
atgtgagttgtttctttcgccacatgttctgttgctggtttccttcggcatgtgtttaaagctgggccagattttgtcagttctgtctgccaccatctttggaagaaagtcgaggaggagttttcggaatattggtttccgcgctttgttactagagcttccagtgtgacgccacagactaaaccgtagaaaacattcgcaagttaccagagcggggtttgggtgcagagtacagtttgccccttctgggacttaatccggaggaaacaaatggattcctgtactctcccttttcggtggttctcaattcagcgcaactcgaattttcattttgcgactgggtctcgattggtcgttctatctctttgcttgtgattgatcgatactttgagcgggtatcttcatgcacatagcctaagtttgcgatccccttttgcgaatctagattgacagtgtccttttaagtctgactgcagttggaaccggtttggctgcagctgggagtgcttgctctccagaaaactcgatgttggtggttttgtttgttgttattatgatcatggttactattattattaccatcactgttattttagttttgttagtttcagcgtcaaagcctgcggcttggcttagttgttgcagatcatatcatgaaagttagagtttttctccggaatctccagctgcattatgcttaaagattccccgcgtgtatatctaattttaagaaccggacttttgacggggttggcttaacctgcgaaggatcgttcttgtattcgaaaggctgaagtaagaccttggatcagaagagagggtcgttgtatgagctgttctttcctagagcaccttgaagcatggaagcttccctcctccatgccttcggctatggcgagaatcaatttttgttttggtcggctgattactgataccaacatcttgtttgttctcagg

SEQ ID NO: 115786 - DNA, 611 bp, Physcomitrella patens
  Intron number 1 from transcript Pp1s438_12V6.1 (locus Pp1s 438_12V6) derived from phytozome v7.0 (chr-ID scaffold_438 ; pos 77825 to 78435)
tcgtcaaccgacagttgttttctccagtgccgctggtactgaactcacacctgtacaagttttgtttttagatcaataacaatcgaacacgagcaccatttgagtagcatccagatggttttgaaggtggttgtctgtcttggtaaaaaaaataaaatcacaataatggttttcttattctagtctaaatcataacagcccacatcttcgaatgatgatgctttctcaagtaaacgatgtagagttctacgtccattggaggcgaatggcaggtctgtagtcagctgaagtaatcactgcggtatatgttctgtggtgaatgtgccttttttcattgggttgagcgttaaatactatttcgctcagcagtacggccttcttgacctgtaatggaaatgttttgtggatgaagttgaagttgaagtgactgcaggatattatttgtgcaactgtgtagtttgtcgcgcgcttctttctttgaaatttttgttgagtctgcgctgctatttttcaaaaactgaagtattaatcagaactacgagagaataatttgttatctttgtgttgaacaaacaggtttcgactgcagggtgagcagaaagttttagtct

SEQ ID NO: 115787 - DNA, 797 bp, Physcomitrella patens; identical to SEQ ID NO: 114753
  Intron number 1 from transcript Pp1s33_56V6.1 (locus Pp1s3 3_56V6) derived from phytozome v7.0 (chr-ID scaffold_33; p os 385362 to 386158)

SEQ ID NO: 115788 - DNA, 919 bp, Physcomitrella patens
  Intron number 1 from transcript Pp1s74_41V6.1 (locus Pp1s7 4_41V6) derived from phytozome v7.0 (chr-ID scaffold_74; p os 272688 to 273606 reverse strand)
ttctggcagctctcaaggtcaccatctggagagctgtaagtcaagacaggatctgatttatttatttatttatatgtatatttgtatttattttccttccccacacagcactatgtgacgcgcgcatacctgggtattgtatgcctcctgggctctaagattgagcagattagtttccaagtcctaagtttcaccgaacttgaagagctccctcacgaactcatcagcatataccttttgcccccactttggcttccgacgctcttgtgtttattgtatcattcgtaatgaactgaagctagaagtccatcagaggtagaagctctgttggcgccttttgcgtattatactgcatatccacccatgaactcttccctttcatacatcctggggcctttcaggaatggattccgtatctttcatgtactgggatcttgcgttaatgggtatcgttcagggagatcggcgtcggaaggccgagtgctgggatcctggttctatctccgtccgatacttttttttttcctgtccacattcagataacatttgaatttactattgtattttgaagaaaaccccttccctggaatggccaaaccagagtctgtcgacgcaggaaatggtcaattctggcctgttgcacaccagaatgccactccttaaagacataccgaaacatatgatagttatgacgtatgcctgttgttttaccgacagagtatccatcgaaatatgtttgcaggtctgggttcttgaacctgaaacaacaatatgaatgataggaattcctcctttcttcaaacttggttttgatgggttgacgatgggttatttctaaattatacatcactttagtaccatattttgtatttaatttacgtggggagagtgttaatgtgatagtgttggctgttgcagg

SEQ ID NO: 115789 - DNA, 576 bp, Physcomitrella patens
  Intron number 1 from transcript Pp1s352_53V6.1 (locus Pp1s 352_53V6) derived from phytozome v7.0 (chr-ID scaffold_352 ; pos 284053 to 284628)
aacttgtgaaaggtacatgttagtgaagaagtttgtaaagctttgatttgattgtgtggatttcttctaatatagtgcgtttaacagttaagaagggatgttcggatattttcagaatgttgtcggttatcttttaacggcatccgagtaggaaaccgggacaacgaagagcaatctgtgtctgttattcttctgcgggcattacagagaacttgaaattgaacatattgctacgagatcagagaatacacgtaaatgtactgcaatacaatactgatttcctgtaaccaatatgctatgaagtgacaaatgttcagaaacacttattcttttcttcatactttctggttccgcagaaagttcccctttcactttaaagtgaaaactgtatgaacctttcttcaggacaagttgctgttgattgcgactagaactagcttaagttgtattatgattcgcttccacaagctcataggcacttcttataaatcattaggttattttgatgggagattttgcatttcactatgtgatattaataaaatgacgttccaaggtttggccttcgtttttcag

SEQ ID NO: 115790 - DNA, 701 bp, Physcomitrella patens
  Intron number 1 from transcript Pp1s338_32V6.1 (locus Pp1s 338_32V6) derived from phytozome v7.0 (chr-ID scaffold_338 ; pos 182191 to 182891)
actatccaactaacttattggaactccctctgtaagtatattgtacagctgaagcgtattttagtagcctagtcgtcacaatcagattgtttgattttaaggctttattatgctgactaagtcaacatcataaagttccaagtgtccgtcaaacagggaatagcagtttgtgccaagtctggtagggctgatcagggagcattactatgattggtgtcgaatcatgtatgagctcagttcatttggtccacacctgagcagaagaaactgacactcccttgtttccttgattgatattcgccatccactatgtcttggacatagcgagttcattgaatggttgcccaactcaagtgtatgtagagtccacatgtgaatgctaaatttatgagagagaacatgatccgtcagagattaattcctattttttgatcagatcaagaacaattttcatgctggaagttaggcggaaagcttccttaccttaggaggaacatatctcatcttggaaaacaggagaaagaacagggaagggtatgatgagtgaacaggttaaagatggtctttctgataggttaagaagagatgtttatgaagggtattatggcgcagatgttgaagaggataaatcaaatgttgaaccagaaaattcattggacatcacaggcaaagatcattgtggtcagaaaggaaacaagaga

SEQ ID NO: 115791 - DNA, 502 bp, Physcomitrella patens
  Intron number 2 from transcript Pp1s60_307V6.1 (locus Pp1s 60_307V6) derived from phytozome v7.0 (chr-ID scaffold_60; pos 1779575 to 1780076)
aggtatgtgttttaagttcctcacccttcttctggacccgttccacgttgtcttggaaaaatattctccatgtgctgtatttgttgttggaattcccacactgttatctatgcacacgcttcatctgtgtagaatttgtttgttacaatgaatatagtaatttcatggtttatcctccggtttttggtatagtttgcagccacattcatagattcgaatcacttgatggacccggtccttgatattgactttctgttttgttaggattgaacttttgttttatgttacatgtctgatttaaggtttgtcttaattttcctgtcctttcattcgttgggtatcttctatgcttttcgggagctgttcagtcatcatgttcaattgaaaacagcatagcacttggtttgagtggctactttagttcatacgtttactggtgttacaagtgaattgcagaggatatgatatcaatattgattacgttttctatttgcagggcccg

SEQ ID NO: 115792 - DNA, 322 bp, Physcomitrella patens
  Intron number 2 from transcript Pp1s210_75V6.1 (locus Pp1s 210_75V6) derived from phytozome v7.0 (chr-ID scaffold_210 ; pos 527757 to 528078 reverse strand)
ttgggcacaagtgcggtgcgtctctcttttagaaaacgttactaactctgcagcttagtgataccgcacgtaagcaccaaaactgatccaaagtagcttcaaaatcgaaacttcccgcacctcttttgatcatgaaacagcgaggtatataattttttcttctgaagtgtgaattatggattctgtcaatgaatggacggaatggatctagattttttttactgtcatttattattttcttactataaataatctaaaagaggagtagggtaggtcaagtcgtgcaggagctcttcgacttcatagcggagagactggtcga

SEQ ID NO: 115793 - DNA, 745 bp, Physcomitrella patens
  Intron number 1 from transcript Pp1s35_130V6.1 (locus Pp1s 35_130V6) derived from phytozome v7.0 (chr-ID scaffold_35; pos 677367 to 678111 reverse strand)
gtaagctgccatacgttgtggattagtcggcattaagcatcgctgttcttgtcatgttttgttcttctgcttctatgatcaccaacttgcgcgtaagttgaaagatgagcgccgtcgtcagaaagcatcctgtagtcccactggggctgaagacaagggtggccctaataaagtatctgattgctgtgatggatactagtaggttttgggttttttatacacgactgggacgaaggggaatatcgattttctgcagctgcaatagcgtgatgaagaagtcacagtattcctatggtttatttatttttttatttttttctgtgaatgattgattagctatggggtgcactttttgtgacagccaattggtatacatggagtcccattcagcgtgttgaaagttgatgattgattgcagtgaaaacgaatttgaagagggatcccattcatgactctgatggatatgtgagtgtatgtgtgtatgtatgtgtgtgtgtgtgtttgtgtgcttacaacatgtctagtgaaatttgagtctgaaaatatgtttggtatgaagcagaataccatgataagattttattgcagttattattacacaagctgtgatgtagttcacacaaaattggttcacaacgcgagtcaaaccatcactagaagttcaacaaaactactgtacagaaagaaaaatgattcaatgacacatctctctctctcacacacaatatcgtgattcgtacagagc

SEQ ID NO: 115794 - DNA, 945 bp, Physcomitrella patens
  Intron number 2 from transcript Pp1s12_214V6.1 (locus Pp1s 12_214V6) derived from phytozome v7.0 (chr-ID scaffold_12; pos 1259276 to 1260220)
gaaacttcatcaccgtaagcctccagatctgcgccctgtcttgtctcttctctttgttgttgttggtttttcgtgtttgaatttcgggtctatcacatctaagtctagtcttgagcgggacaagaaagtagacgagaaagtttgaaacagtttctcactatattgccaacattaggatcgaaattttctttctactcgtgatgggtcatcgccgccagacttctttgccacgtccgggtcttccatctctttgatcttgagctcggcaatttgtctcacagcatctacacactaggttctggggcgaagttgctactccagacatggtttactaatgtaccaaagtttgatgtgttgagttcagtagttgtgagtagttgctcccagatcatatctggatgcacttgataatcatgctgtgaatattccccggtttgacgtctgtaggtcttgtttgtggtatgcctcagctcctttttagtgtcattatctgtttctaattgagagattgtattgtggaaaatgcaataactgttaaatctaatttactcccttacaagggtcacatccctgctttgggaaatggggtgatgtgtgatctcaaatacactgattctgcgactggcgctggtagcttacagcgttggatgctttctttggtgatgtctcaacattgattctgcaccgtttagatctcactctgcttgacttcacctgaagcatactgattagcatgcagaatcgatccgagcatgtttgcatgcactgaagactttgctcgatcggttcatcgagcctaagttttgaagactcttagaatctcaaaagtttgcttttaaagaggataagcagttgcattggttttggttggtcttgtagctgatcagcaggcacctgtttctgattacaggaccgacctacgacaaaggtccacgctgctcctgg

SEQ ID NO: 115795 - DNA, 675 bp, Physcomitrella patens
  Intron number 1 from transcript Pp1s102_34V6.1 (locus Pp1s 102_34V6) derived from phytozome v7.0 (chr-ID scaffold_102 ; pos 202721 to 203395)
tcggtacgtgtggtattgtctttcgaccttagaaggtaaatttcgtaaagtagggaacaccgaatttgataacagagagctttcatagttccattgcaggctcctgaatgagttacattctctggcaatctgtgacgtgtacataattgtccgcacctcaaactctgaaaatccgattcaaagttcatgacattcctgcgctattctattgctacattttttgctttatcattaacaattgtggactactgcatggaccacaatagtgtgaagagttgtgtggaagctgacagcaattgaaatcgctggcaatattgtgacaaagctcatgaaagttgacgatgaattaatttgacgttatcattaatgttatcaacatatcggatttatcttttcacaagcccttgtgaatgcatttcggagtctaaaattctaacccaaaattgttatatactgttacaaacataattaccgttaatctgcaatattgagactatgatgaacagaagatgaaaaagaagagatgcatggtagaatctgagcatccgtgagacaacaccacgctcatcatcaataattacatttcagtgttttcatctgtggcgttttattttttttgttttatttttttttttcgcagacgcgacttggttgttccttacacagcttgtgctc

SEQ ID NO: 115796 - DNA, 319 bp, Physcomitrella patens
  Intron number 1 from transcript Pp1s7_448V6.1 (locus Pp1s7 _448V6) derived from phytozome v7.0 (chr-ID scaffold_7; po s 2734459 to 2734777 reverse strand)
tggcttgtgagtgctttgcaacttagtcatggaaacgcccactagatcgcgggtgaatcatttgtaagaatcgattaagcatcctgatcacaatatacacccagtgagccaccatttaaaaaaaaaaaaaaaaaaaaaaaaaaaaaggataagaaagaaagaaagaaagaaagaaagaaagagagagagaaaaaaacgaaacaggcgctgagctgtcgtcaactttgaggtttgttaaatcatcattcaatcgtcgttataatcttcgagggtgggaagcacaggcattgaaggccattgacaggggagccgctgaagg

SEQ ID NO: 115797 - DNA, 566 bp, Physcomitrella patens
  Intron number 4 from transcript Pp1s278_52V6.1 (locus Pp1s 278_52V6) derived from phytozome v7.0 (chr-ID scaffold_278 ; pos 548607 to 549172)
gagaagattgtcaaaattgccgtaactcccatcaggtacagcattgattttcttcacgattcttcaagggatctcagaacctgcacaagcactactttttgaaattatgttaactgcctcggagcagtagtagcttcactatacccgattttagagtgtttctcttgtttgttttgagaccattttatctgttaaataaaacatacgtatttctagaaattcagccctttcttgcttgaaattcaatggaagattcctgctcccgactttgatctgcaatgatgatacaaccacttcctcaggtttttctacttgcgtatgatttggatttgcaatcgcagggaagagaacgtacgtgaccaatcgctctgaaatctgggttggtcctggaaaatacatgcaatggtttcacgtcttgggacctactcatttgtggcctttctaatcttgagacatgaattcaattccttgttcacgaaagactctctatagatattcttagcatcacatattctaacgctctttgtacagcaacggaggcaagtttcagagtgccatcgatctct

SEQ ID NO: 115798 - DNA, 861 bp, Physcomitrella patens
  Intron number 1 from transcript Pp1s62_178V6.1 (locus Pp1s 62_178V6) derived from phytozome v7.0 (chr-ID scaffold_62; pos 1351609 to 1352469)
gtcttgttgggtcctcgacaggcaacgtttttcaagtgagtttggattttcctttggattgtgtttggtttctgtgcactttttgaggggatccaggtattaggattcctgtaggagggttttattagggtgtgatttggttttggtttgattttgttgtcgaatggtgcgtgctctctttttcatcgtggttggatcggcatagtttgcgcggatgggttcgattttgggttttttcttgggtggcagagttgtggaaaggatcttggctgcgttcgaggaattattaatgcgctgactgcgcttgagtgcaatttctgtgccaggggtttctttcggttttgtaattgaaggaattaaccatagcttgagtcctcgtctcatagtcgagttttatatgtaacgcaggaattatgttggcgtgtagaattcaacgtatttacagttaataaccactgataatgttctgcctttacatagtgttcggtaaaaagtttttatagtttgagggcatgatatgtagcgtctcccaatagtccccttcagtacagtgcccaaacttcagaagcccgagtttcttgaaggttatgtccgaagcacagttttagaggaggctataaccttttgattcgagatgttcttctacgaaggggtgttttatgatggcgcaaacttgagtttcagtttgtgacttacgcattttaatttaggttctgctcagaattgtgaattagagatgcgaatcacttcacttctaagttgtgttaccatgttaagtgaagaattcgagacttagaatgtgtggaacagactggaattctcagcattgaaaattttcagggttcgcagggacatttcatc

SEQ ID NO: 115799 - DNA, 797 bp, Physcomitrella patens
  Intron number 1 from transcript Pp1s150_86V6.1 (locus Pp1s 150_86V6) derived from phytozome v7.0 (chr-ID scaffold_150 ; pos 723497 to 724293 reverse strand)
gcttgttgattgcgtcggatctggaccacaccgtcgcccccttgccttgcgctcatttgtgatctttttgggtgcagttagcctggttatgtgcttcgtaactcgccattgtaatgtggtagcgttggacaggttcactcttgacagaagagtgcacgaatcgttggttggttctctcatcataagatgcgaattagtgagaaatttgttgttccttgtaatgaaccgcgtgaaaggagaggaaggcgaggggattattgtcggtggattgcatttttcctctttcgatgaggaagcattttatggctttttagtgtggtcccgatccccaccgacggtcgtgaaacaattcttaaactattaattttaatatttaactaaagcatggtcggaattgctggtatctctcatgctttctgccttgcagagtgtctcaccggtgacgccccgctagttgtcttaatctctgaaagtacttacctacattgcactgtcaacatgttctgccgatctttgagtagacttctgtattgattgttgttgaaaatttaaaagacaaagtattggtacatttattgtatcccacttcggtcgaattagagattttgaatattttactgccctcaggaataggtttttccaatgccacgtcttaatggtcgatgcatgattgctgacttgaaacttagctccttctcaaagcatttagaatgcaagaatgagactaaaaactaattttactactgcgcgagtttcctgtgaatgtattgaccaatttgtttttttacaggtggagc

SEQ ID NO: 115800 - DNA, 507 bp, Physcomitrella patens
  Intron number 1 from transcript Pp1s161_41V6.1 (locus Pp1s 161_41V6) derived from phytozome v7.0 (chr-ID scaffold_161 ; pos 289046 to 289552)
attcactttacaaggtatacattcaagttcaagggatctttatcttatgaaacaacagtaataaccttctcttcgataatcgttaaggatcttttggagacgtgtgtcaacgattgaaggaattcgaaataactgatgctttagtaccaccttttgtgtcatgttctcaaggaggctgtcatgatgatgcagaatatcaagagaaaacctcggtgtttcaacactctaaaagctcccaaatccttatgagcagcatggcaccatactgataagtcggctcaatttattatgacgttaacctcctaattgttatttctatgcactcatcacagatacacttaccatttggactatttttttctgccagggatgtgcttcagcaacctctaatggtcttcatgttttgatctaacaatcatctctggacgagttgtgttgctacccatgttcatttatttgtttatctgaacaggcaaataagcgccagatcgagcaaaataagaagcg

SEQ ID NO: 115801 - DNA, 586 bp, Physcomitrella patens
  Intron number 1 from transcript Pp1s99_62V6.1 (locus Pp1s9 9_62V6) derived from phytozome v7.0 (chr-ID scaffold_99; p os 463334 to 463919 reverse strand)
aaattgctcggaagcagaaagaggtacttgacaattcactcatcgtgacattgttctcacagcccttgacctttaaggcattccttttgagtctgtatactgtcgaatagtgatgtagcaaatgcaccatgcagtcagacctagaacgagaggctagatttgtttcctacaaaaccctaactccgtgttgccttttcttgttcttctgacattaaataaacgcagatgttcctaaatatttatttactcttaggggactgtcgaatgcgataacttgatcatgtaagcttcttggacagttgtgtagattctttaagatattaaaacgttcagaaatttttagatgaccgctcttttaatgaggtaaaatagctggatttagcatgtgattcgagcatccacggtttcactttcccagagccacgtgggcctaaatgaccaaagccctaaaccttgaaagggaaatctgtgttgctgaagtgcacatgttacttgaggacagcacaccatgattccctggaattatgagtgtctgctttgtggttaaataggagaagaagcgactgacagaggagctgaagttgac

SEQ ID NO: 115802 - DNA, 1025 bp, Physcomitrella patens
  Intron number 1 from transcript Pp1s5_149V6.1 (locus Pp1s5 _149V6) derived from phytozome v7.0 (chr-ID scaffold_5; po s 1036133 to 1037157)
ctcctagtgcaaggaaaacgcctgccgagctgtgggtatgatctctttcgttgtgtggatgtttctggaatcgcccgcaacatgcaggctgtgcgcaccaggattcttttgtaaagaacggtgcgatttgccgacactatactttacagtaggggtatcccattcagacgtaatcattggtagcttttggagcgtttaggatttctgtgtatcactgaatcacatctctctcaccagtacagtagttctttgttttacatgtatgtagatgaagacgcttattacgtaattgatacagctccactcaattttcctagtatcccactcgtgttttgtgtttattagagctttaacagaacttacagtgtcagtttttacataatggtatttaagtttttggtggcttttaggaaataatatgttcatagtcaaacatgtcaatagatgtgaagttagcacagaagacgcagtcattttagtctccttttgatgttggtctttgagtccgtctttgcaaggagccgacatgtattcgcctttaagtttggtctaaatctccatgtttaaatttgatattaataattgtttatatcaaccgtttcttcaaatacgaagggtttatttgcatgcactccattctcaggaccaggaacaggagaatagcagtcaaacagtgttttttctttgggaggtgggggagggctggggaggagcagaccctcatagttctcttctccagtttctggtccctggaatgagtaaacgtcctcgaattttttgtaacgatagatacacagtgacggtgttgtagcattccaattatgcttaaatatttttagctggcttgctggttgtacatatgaattgggattcttcaacaattgaaggtgtaatctaactttttcgggacacacagttactgctccgattttaattacagtagatagttcacccagcatgaatttagttactatattggatggagtgcagctggagcagttgaagcggcatcagtcatcaaaagt

SEQ ID NO: 115803 - DNA, 611 bp, Physcomitrella patens
  Intron number 2 from transcript Pp1s427_21V6.1 (locus Pp1s 427_21V6) derived from phytozome v7.0 (chr-ID scaffold_427 ; pos 70946 to 71556 reverse strand)
cggaggcgtgttacaggcgtgctgtacaccactaagtgagaccctttatccctgttcatgactcctcaactattgtcttgcggactctgttaccatgattgtatgtttccatattattattcctgccattgttaaaaaccttttgaagagcttagattcatgtggaagacaacctgcagtgaggagattactttttccttgggtaaattatgttgattgttatctatgtttctccgttgtttttcaagtatgtccatcaccatgttccccattctggtcttatgtatttctttcgtcttactattatcgggttcaattggttttcagggcttttgaaaagcagatgataatggttttgacaaattagatgccaagttcatgctgtttactgcgagtgtacgaaaaaaaaaatttagaagagatagcaaattgtgacttcacgtaaacagaagatgcagtaaacttccaatttacacatatgcaagctaagtgtctactcaatgtccactcaatgtcaagtatttcccaacggtcttctccattgatgtattcaatttgttttgtttgaatcaggctcagtttaacgattaaggtgtggagacggcattatc

SEQ ID NO: 115804 - DNA, 767 bp, Physcomitrella patens
  Intron number 1 from transcript Pp1s39_82V6.1 (locus Pp1s3 9_82V6) derived from phytozome v7.0 (chr-ID scaffold_39; p os 290061 to 290827 reverse strand)
attcgcctcgagttggctacgctcaaccagatcaggtccatcagcaccgttttcccgtctcccctgctgcgatgtgcattgtttcccttcgctgcgggattttatgctctgtgatcatctcgagcttcgcttattctcgcaatgctggtggaataaattttcttgacaatctcctcacttcacaaggcattgcggatgtttctgttctaccttcgtcgcgcgaagtttgataatgtgactcggcgctgccgactgtgtccatgacggcagagcagtgtaggtgtcgtgtttagtatgcatattctgcgcggatgccctggtgtagaaatgaatacgtaattctttattagaaaatctccgcgtttttaatgctagtttggtccgtggttgtttcaatgtggatcttttttctggatcttctgtcttgagagacggagtatcttgtgaattgttttgcaagcgcttttgctctaacttgacgatgctttaatatttctgccacattgaaacaaatatatttagtgatttgggaaggtaatcagacctgatcaattcgacgatccgcaatgcggcacgcgctgcttatcgatgtttttatgaaactttgaactcttggctttgtggtatagtgcaagcaggttgttgcattcttcaagtgaaatcgtgctgtagaagttcgaaggaactgttgtgttaagtatgaatttgaagcattgagcagcgaatatcatgttctctcaacttagttttcgtcttgtgcagcgata

SEQ ID NO: 115805 - DNA, 826 bp, Physcomitrella patens
  Intron number 1 from transcript Pp1s41_304V6.1 (locus Pp1s 41_304V6) derived from phytozome v7.0 (chr-ID scaffold_41; pos 2055976 to 2056801)
ctctttccctcacgtcgagcccgcactcagccgtgggtttccgattctccctcttgaggtttcgaaatgtgtgtcccgcacgctgcatcgctgctgtttcgccgtgtggcggccgttccaacgcactactgtgatccatttctcgacgagtagcgaagtttttgtggttcgaagtttgggtttggcccttgctagggttttggttttggttacacgatttgacgattgttctcgtgcgcatccgacctcgtgcggtcgtagaatgcgcgctcctgcttttggatgacgcgttattgcagtgcctctcttagccagagagattttatattagggttttagcactttttagggttcttggtgctgggtgtgatgattctgtgctgtatttttggagtttgtgagaggagcgtaccaagagcacttgttccagtttgtgaacacagtgatggtggtctttgccattcttcaccctgagcttctgcatcgttggcttttgctgggtagagttttagtttcaccggccttagcattcatgcgttttgcgcattagattttctcttaacgattcattgagttctggtcctgggcctcgaaggaagggcggggtggatacgtttgattcattgagcagttgagctctcgtcaggagggatggtaacgtttgcatgacatcagtcgcaatgggtgtgtagtttgctcccgaaacttcttaaatggatgactcttgccagggtagttatggattaggatttgtttatttacttatttcattttgagcttggtatgttctgtatttcaggcgtccgaaaagaagcagcagaattta

SEQ ID NO: 115806 - DNA, 603 bp, Physcomitrella patens
  Intron number 1 from transcript Pp1s38_256V6.1 (locus Pp1s 38_256V6) derived from phytozome v7.0 (chr-ID scaffold_38; pos 1462664 to 1463266)
caagtaagcgaattctgagcacgttttcttttgctgaatgtggtatgctttgagtgttttgaattggctcgtgaggagttagaggacgaagaagaagcagaggaagaacgtttctgagattcgtgaggaattggcgttccttgtgtccattttgtttctgcaatgaacgtggattcttgatgtagttgataggacgcttcgacaacggtggtttatcacttgttatcgttttcttgagcccgaggatggattctgtatgagcatttactaattttgagctaattatgtagttctgtatactgcgtatttgcgtcgttgtctctgctgttgagattgaatgatgaatgactggagcaatccattagcatttggcagctctgaaagcttagtgttggactgtgtttggcctggttctcgtattaagctgaagctgttctctgtttaggagaatgaacatgtatttcgagttcctcatgttgcagttcctttcgatgtttcgtgccttacgtcactgttgtagttacatcggggttttggtggttcatattgtgcttgtcaagcttgcttaagaaaccgaactgcttcctcgtggtgcagattgca

SEQ ID NO: 115807 - DNA, 916 bp, Physcomitrella patens
  Intron number 1 from transcript Pp1s94_22V6.1 (locus Pp1s9 4_22V6) derived from phytozome v7.0 (chr-ID scaffold_94; p os 131189 to 132104 reverse strand)
tcttgcagctgtcgctatctgccttcttccataaggttgctccgttgctgaccctacgtgatcgttgctgccaccgccatttctcacgtctcggtactcgcacgcgtctagggtttccgtgcccatttcaattttgattgcgggttgcactgggggttgcacttttatttattcatttatttcttttgaacgtagcgtaattgcggcgttggtgagtggtcgagcgtgcgcagtagaggatttatggtgttcctggagggacagggccagaagtgatggtaggcgagtttgttaatttatattttatgtgtggtaccgactcggggtattgcggcggttttatttatttatttatttatttttcctggcgtattcaatgcttgtttaatccgatgttgtgtttataagtttcgggagctttgtggcgaagtgacgttttcggtgtcggagcatgccaagtggtacggttacgtgtgagggagtcggagagctagcagtgaactctcacatttcttcgactgcgttggtttgtgagctacgttatttcgtaatatttttaaggcgttgggcttcttcttgccatacacgctggcagaaggtcgtccgaaacgtgacattcttgtcattgtgctttcgcccctggaaattttctggcagtaatatcattgtaatggcaatgatgtgtttcgtctttgaaatatggaggccagcatgtggaagcggcattgtgactctggtttcacgcgaagtacagtgtgcgtctgacactgcaatagtctttcatattgatctttcggaggagttcctactccaggtcgattttcttgcgagagggttttacaaaataatttaaaaccgtttttctttggatcttgtggcaggtctttcttagagattttctttattgcttcggcag

SEQ ID NO: 115808 - DNA, 935 bp, Physcomitrella patens
  Intron number 1 from transcript Pp1s174_91V6.1 (locus Pp1s 174_91V6) derived from phytozome v7.0 (chr-ID scaffold_174 ; pos 637252 to 638186)
tagctgcagctgcagttcattacacaggcatctcggtattcagcgcttcccatcaatttttgtgtcgaatgtttggggcgcttgagcgttttgggtttggtttggagtgagttttggactgcaggttcggagagagtgtgtgttgcgcgtgcaattgtagtttacagacatcggcttgtggattaaaatgcaagtgaggtttcattttcttctttcacctttcgagaattgtgggtttcgattttgaacttgtgaatagttcactgggaaatatcccggtggcatgcagctggtggctacctattccacgcctccaccgcgaatttacgctccaactccaatctcgaaggcttctctttattttcgatgtcatgtagaatattctggtgctgcacacatcatgtgacgtgccgatttttttgtctgtgcttttttgatgagattttagcggcattctgcaatttcttgcattcgggaactacaaaccctatttcacgatctagtgaaagtggtggccaagatcgtgggataaaattggatactcttggccaatcccgttcacatttaagtttaaccttgttcaccgattatttctagtactgtttctcgaccatcacatctaattagctgctgtgtgaaattgttttcaaatgatattttcaatggttatatgttcattagattatcgacatctgccagctgttttgacttgaagtctcaggggatttcttataactagataccatacttaaaaaccatcatgtggtgtgattttgtcatgagaattcgattagagttggtgtggtgttggaaccttacttggtcgcctgtgttttggttgtttattgaacttttagatcactgttagtgtaaatcttgaatgatcactgttctgtgcaggacaaggaactgggagaaagaaaggtgcggtgcta

SEQ ID NO: 115809 - DNA, 996 bp, Physcomitrella patens
  Intron number 1 from transcript Pp1s56_194V6.1 (locus Pp1s 56_194V6) derived from phytozome v7.0 (chr-ID scaffold_56; pos 1474829 to 1475824)
ggggtaccgaagaagctgtgcaggaggagctgacggttagttcgttgtgctcactgtgtttgtgtgtgtgtgtgtgtttgtgtttgtttttgtattcctgctgtgttgagtagcgtcggtggtagtgagatgctgcggttatcttttaccgtgaatcttgtggcagaggtggatcaatagagtagcgttggcctacaggttacaggagttttggacacagttgatgttctgtgttgtggaggtgttacgcttaggtcgtggtggtacgaggtggcgaacctctcttgcttgcttgctgtgttggaagctcactctgttgttgtgtgttgctttttggagggtaacattagttatattttattttttattagtatgtgtcaggtcgaccgttgaggcgcatgcggtcaatgtgagtggagttctgcattcttagtttcgatttccctgagaagatcgggttttagttcagaaaaactgctagggttgaaaagtgcttgcgttgaagggagtttctttgatgttaatgaccgagatgggttcgatgttatgaagactgttcatcgctcttgtagactccactcgtgatggcgtaacgccttgccctttctacagcaccagcttgaatgtgttttttatttattggtgattcatttccgactttacttcttgacaagtgtttgtaaccctgcgttagttttcctttcactttggttagaaagtgttacatattcagacttcgcttgttgagagatcgtttcagatgtattcgtcggtatcgatcgcgatgggaggacttatctttctttctcctatgtaaagtgcatgttaatggtattttctccaacattcttttattacggcgcatttgtgttatcacatatgtcgtctcttgacgtgcagcgacggaagatcatatttggctgagtgagttatttctgacgattgtgatatcctcttgcaggactatttgtctttcgtggagatcagttgggatcg

SEQ ID NO: 115810 - DNA, 942 bp, Physcomitrella patens
  Intron number 1 from transcript Pp1s116_174V6.1 (locus Pp1 s116_174V6) derived from phytozome v7.0 (chr-ID scaffold_1 16; pos 1035287 to 1036228 reverse strand)
ttgctgttcctccgcagcaacctgcgctagcgaaggtgggtctcttttccaatccacacctctcctggtgacagagagctcgtggacgaaatctactccaagtcccgtattcaagggatggttggcaatcggcaaatcacaacagtcttcgttctgagtctttgcaaccttgagaataaagatctgtccattactgggctttgtcatgatgatttgcctttaccaactccgaacctatttcatttcaacgtcgatcccgacctttccagccgaaaccttttcgaatattaccaagaatttgaactcactatggctgggtgtagagtggtttgaatgacgcacagtttcatttcatccgaccatttgacatgatctgtgactcttgaagtagtcccagccagtcactaacgggggtgctaagctagtgatgcagtgttcaacaagttgaagagaatcaatacttgcagattaaactaatcatatcatcgttgttcaacctaggacggcaatgccaccatagttcacgattagggtgtgagatgtcaaaatatcagcccaccttgcagacgacaagttctagttcaaccacaaacggacaatacaaagccgcgtcaactgtcagtcggaatatgccgtatgatgactgtcactgtggtcaactccacaccatccgatgcttcctccagagtgaccctaggcgactaggtgtggaaaatcaaacactaaaaagggtgcgatatcatccaccgaggcagattgtcggtacaacgctcaattatagtgcgtcaggttcggacttttggggatctggaggagattcatgagctgtctcttcttcgtcatcgcagtttctttgttgctgcatgtgcttgatttgggtcccacggcaacttgacttttattgcagtgtcgattccgaaaatttgtggaggtgtctgtgga

SEQ ID NO: 115811 - DNA, 686 bp, Physcomitrella patens
  Intron number 1 from transcript Pp1s84_242V6.1 (locus Pp1s 84_242V6) derived from phytozome v7.0 (chr-ID scaffold_84; pos 1321299 to 1321984 reverse strand)
tcagatctgccatttcagccgtcccagtccgacaggtatccgtcttcctcttaatgtttttttcacttgccttgagagtgtttcttctttcttacgggaattattaaggaattttgatttcagtggcgtggaattgcacctccctatgcataagtggacttcaatggtgtcttagttcttctttgtttgatcgtctcggttttgcttttggcgtaattctcaggtcatggatggtttgtccagaaacgacgctgtataaggttttaaccttgtggttcgtgtactttagattgcccttttgatttgcaattgaacgcccgtttgactgcagaacctcctcagcagtttgttagagtaattgtgcgaagtcttacagtactgattgcattggagttctaaaatccaattagccaatacttgttcctatgtacagtcgctctcaagaaattggagcttcttctgtgagatttgacagctgtgcgacgatgaagaattaggggcgtgtcgttgtgaggctgtgtttgcatcagtggctgtaattgaagaggccggctgaatgattgaaagaatcctctctgaaaaacagcggagctctctgttgttctgatcatgtcatgcacactacaccagagtggcagccgttaaaacccgtatatgaaacccttaaatttctctgcaggcgtcga

SEQ ID NO: 115812 - DNA, 956 bp, Physcomitrella patens
  Intron number 1 from transcript Pp1s51_56V6.1 (locus Pp1s5 1_56V6) derived from phytozome v7.0 (chr-ID scaffold_51; p os 373389 to 374344)
gaattttgcaccatacacgtgagtgtgagtgagcatatcaaaagaataatttaaacttaattatatcttttcaaatcaaaagaatgattaaaggttagtaatgagtcttacaacctgttcacactagtccagagtctaccaataaggtgagaaacaacaaactttaaatcttgtaattggttgaaatgaataagcttcataattttagccgatcaaaggatttgaaaaccgtggcgtagaagaagaaaatgggattgagaaatgacacttgatttggtgttacaagagattagtaaacttccacacaattgacgtctttttactaataaattagaaaaaatagttggaaaatacaggatggaatattttgcaaaattttgattggattgtctttaacttttcaaatgacaaaattaaaccttcttttgctaaatagttggttacagatcctcttctaatttaaaatgttaatgagattttttcaagcttttttttctatgcttaattgtgtagatactgatccatgacacaaaatttattcacaaagcctgcagtcatcgcaaaaatcctggtctccttcctcacaagaatcaccattccttcatggccaacgcacagtttttgcacaatacaaccaactgaccatcgatgcgggttgtgagtcgaagatcagagggtgccatgaatcaggtgggaaaatagagtactatctcctcttcaagtttcaaccttacccacacattacaacaacttccaagacactcttgtctagaaccccgaagaggctgtgtcgacgttgaggcgttagttccagcgcagcagtcggggtattgtggacaacagcctctagatcagtgttcaaaagcaaccgtcgcagtatcctagacttgataatgtaactagtacgtgttggtaacgcaggtaaagtgcgtgcagttgtatcggagacttgcgtg

SEQ ID NO: 115813 - DNA, 924 bp, Physcomitrella patens
  Intron number 1 from transcript Pp1s26_48V6.1 (locus Pp1s2 6_48V6) derived from phytozome v7.0 (chr-ID scaffold_26; p os 397263 to 398186)
ctccaattataatagcgttggcggtaggtgctcttttgtacctgtctttttcgtgactctatgcgtattaacgatgtgaccaggatcgcgatggaacgtaattgtaggcacattctttttcttctccctttgcttttgtttaggattttatgttttgaaattcgaatccttaggtagccttgccgattcggtattgggagacctaatgatttatgtctgcacgactgcctgggtgcacttcgtctagatccgtatccttccgccgatgacattaattttccgtttccaaattggaatgctcttaaggattatgatcaaagagttgtgcttatatcagcggagcctgtagtttctgtgcatctttttctagtcggtggagggtttttttttcaaggaaatgaggtagcggcgatccgcggtaatttagaattggaataattttccaatggtgtagcctggcatgctgctgcttgaatcaattttttttctgttcctcgagatggttggaatgagtgtcatgcagttacgatgcaacgcagtatcgcggtctttattatttcctttcccacaatgcctagtcgaaagcctttccagagcaacatgtattgtgctagagcttgttggacttagcaaccgagtgcttattatcgaagaataatgagaatcagttagattatcttgaagccggtaaagaattgttgtttgtatgcacgactgttccggtttaggaacagcgtgaagtgcagcttcacagaattgttaacaaaggttacgtagtacgttccttcctatatcgagagatatttaagattcaattagcatcagactgttgagatatttgtagaaaatgactaaaggttctcgagggtttgggacctgttttgattctcagtggaggctgcaaggcgagctatcgaggaatca

SEQ ID NO: 115814 - DNA, 562 bp, Physcomitrella patens
  Intron number 1 from transcript Pp1s7_29V6.1 (locus Pp1s7_ 29V6) derived from phytozome v7.0 (chr-ID scaffold_7; pos 127001 to 127562 reverse strand)
aagtgagtcaatctgaagcaagaggggttgacaaggtgagaggcttctctgcaatgtcagtcctctgccagaaccgcaaaacaaaggcacattgtgttgttgcggttgcaatgggcaagtaagtaaaggtcaggcggggacgatggattcatgcgggatcctcgcaggaccagaactagcctgactggctctcatcactaccttatcttttatatttgccttccttatcctattcttgtcttgagcgctcacagataaactctcttgtgtagatatgtaaagtttcgtaaaaatactttttgactatattgtgacattctggacaaccacttgttttgttttgcttcaaaaatttattatttttttagtgtcatacacaatagcactgaatgtatatgatactattgtttctaagaataatttctacaactcaaaaaaattactcataaatttgttttctttaatatggatattttataaacaagggacgggatattgatttaacttgactcaaaattgattccctacgggagaggtgcccaggggagagtggcttggactc

SEQ ID NO: 115815 - DNA, 973 bp, Physcomitrella patens
  Intron number 1 from transcript Pp1s26_3V6.1 (locus Pp1s26 _3V6) derived from phytozome v7.0 (chr-ID scaffold_26; pos 39082 to 40054)
ctactccccgggtgaagactcagaatcttcccaaggtatatatatgtatacatatgtatatatatatatctgttgtggcataattgcaactcacgctaagcgtaatagaggattttgtttcacatggatacagctagccaggattttggagagacgggcatgaaagtggaacttccaggctacaagcttcacggttgaagcttagagttggtttacttggtttggctcatgtcgttgctcggtcttcaaacttatcattccgtgttcatcgccgcggtctatgttattgctgttcttccttttaccttactgactctaaatcgtctccttaaaaggagacgattttcattcgcagggttttgttgttgtaattctttcttttcgattatttatttatttatttattttttacctgaatgatttatttctttgaacgcgtgaggaagacggccaatagcataacgaaactatttgtgctgtgtgtgttctctccttgacatcaatgggcgctgttttcgaggcgggaatgcgttgcgttataagttgtgtgtgctctcgatattttgatcgtagactgagatcttaaagatgttgaagttctagattagagacagagttggaatttttcttcgtttcccaatggttgcacgagcacgatgtttcataacctttagacttgtcaacatattgcgtaactattatctcatttatcacacttgctgatgtgattgcaacagcaatcgccaacgctttcgttgttgtaaactctgcagtttaaatgcagcatttttgtttcaaggcagattgtgtaactcctctgttgcaatattcttagttttgtagtttaagcacagtaatttgaattcgattcctaatcattgcttctcacactttcatttatttgtttgtttgttcgtttgttttttgatgatctgcagtcatacgtacgggattcttctcagaagcggtgtct

SEQ ID NO: 115816 - DNA, 525 bp, Physcomitrella patens
  Intron number 1 from transcript Pp1s12_317V6.3 (locus Pp1s 12_317V6) derived from phytozome v7.0 (chr-ID scaffold_12; pos 2203801 to 2204325)
cttcgtgaagatttgaggttagatggggagtgattagtggagtgggtagcctgtcacatcggatttttcaaaaaaataaatgtcttgtgtctagttgttatcgagtgagtggaagagtgtttcggaatgcggtgcaaaacatgcaagattgcaaatgggtggatctgtgctttgctggtttctgtgtaggttgttcgtttgtagcttttgaattctgttcttgcggtgttcgatggtttggcgtgagagtgccagtgtgcagatgacgggcgtttgttgtaggaaaagtttttcagagtgtgtgtaaagtggattagtttgtgaaatggaggggcagtttcacacatgctgaagtgcgaggcttgtgaaggttgttgctttgctatattactcatcttgcattcaggaatggaggtttagtggattggcgggaacgctacttgacatccaagaatggtaatttgaatctagtttctgtcacgtgttacaggttcgtctgcacggtcgctagagattttcaagtct

SEQ ID NO: 115817 - DNA, 321 bp, Physcomitrella patens
  Intron number 2 from transcript Pp1s130_37V6.1 (locus Pp1s 130_37V6) derived from phytozome v7.0 (chr-ID scaffold_130 ; pos 224848 to 225168 reverse strand)
tcacaggcttccgagtaagaagcagtcttacagcagtgagtcattgattcaggcacacaaatccaattcactttaatgcgtcgtagatgtctgaacaaacatgttataattaagatgtgtgtttctatattggctgtcaatatttcttcgtacaggctagggaaaaaataaaaaataaaaaataaaaagaaaaacaggggtaagtagtgtagaatttgatgtgtgatacatgagtgttaaagttagctgtctcgaggaaaaacacattttgcacttccgcagtgcttctaatcatattcgttggctattgttgcagtacca

SEQ ID NO: 115818 - DNA, 754 bp, Physcomitrella patens
  Intron number 1 from transcript Pp1s30_338V6.1 (locus Pp1s 30_338V6) derived from phytozome v7.0 (chr-ID scaffold_30; pos 2346196 to 2346949 reverse strand)
gcgagggctttcggtgcgcctgagaattctgaatcagttcttgcacggtttttccacgtgcgaaaattgtgttgcactagacatttcatttcttcatgtagccgactaaacaatccgacttacgagggtcattattagagattgatctggtttttcggtagagttaatttgactactggatcagtcatcgtcgaaaaagcttttcttgtcctatcttaattctttagtaattccctctgtagttcacccttcaaatattgtgaccacctttgaagccacttgtgaagatattcctcaaagctctactggacttatgtcaatccgagtgatgtgtagcttgagtccagaacttggacaaaaacgaatgctatgcaacaaagtttccaactgtaggtcattgctgtgcttgcttaaagaagtgcaaatgcctgcttctctcgttcttgtgagttcgtttaaatccgagatgatttaaataattgaatctcgtttgaagagtaatgagaggaccaattcttgtctcttacaggaaaacaatcaccttgagaagaaggcttgtcaatactaaacccgtctttgagatttgaaagagatatattaagctcatctcatcattcaaagtattataaaaaatactttcaatcgctactcactcgatcaccttttgcttctgttatgtcacattcactaacaattgttttacgaaaaaacattttagcagcaagtgaaacatataatgtgtcaagcagcgaag

SEQ ID NO: 115819 - DNA, 1061 bp, Physcomitrella patens
  Intron number 2 from transcript Pp1s70_238V6.1 (locus Pp1s 70_238V6) derived from phytozome v7.0 (chr-ID scaffold_70; pos 1475704 to 1476764 reverse strand)
gaacgtgccggatttgtatccgcaactagtgaaaggtgaattctgttgcttggtgaagttcctgtggtggcagtttattttggatgcggtgaaagtgaaggaatttatctatttaaattttgagctagatcggtgagggcatatgttcgggttgttcgtgtccgtcggatcctaggttgggatttgactaatttttcattaggaaggcaactcgattcatttgtagccatctatgaagcaatggagaagtgagcatggaattgatgtcataagctgctcctcgttttggcgattcttcgcattcgatcgtggagcacgttttgaactggttcagttggcatctaatttagggctagacttgcaggaacacatctgacatttcttgtcctgaactctaagaaaattcatttaattaaaaaaaatatatatatatatatatatatatatatatatatattgagaagggccattggctagatagtttcagaaacagagcgtggtgctggtccgtgcaaaggtttttagtagtaaatatggatctttttctacagtgctatatttcaaggctaaaaaatcacgttttagtcttgaacagaaaagtttgctacttcaatttgaactagcttagtgttctgaatcaaatgacttcattttcggtgaattaagaagggaatttctgttcgaatgtcaaattctttcatcaagaaagtcaggatgggagtaattctggagccatttctactttttcttgtttttttaaatctaggtgctaatgtaataagttcaacaatcataagtcttcacagctacaagcatattgctcattaagcatagcttatctgaaaaggtctagttcatcgaagttggagtacttttatttctgatcggaaccactgaataagtggttcgttcagctgatgtcgttagtcttccatatacagttgtactgttcagagcttatgatatatgtattgtgatcaggtttaaattaaagttgaatgacgcatgttagttatttgtgtgttctgcagaggctgctgagaaaacagcagaacaattgg

SEQ ID NO: 115820 - DNA, 627 bp, Physcomitrella patens
  Intron number 1 from transcript Pp1s11_387V6.1 (locus Pp1s 11_387V6) derived from phytozome v7.0 (chr-ID scaffold_11; pos 2835659 to 2836285)
cccactcctttcgaaacgtgacttttgcagctggggtacctccatcttgccgaaacacttgtcgcttgttgaagagagaggagttgagtgactgattgaagttattttaagtcgacaagcgtagagtattctcttagtctacactccgtgcaaaggatttagttcgatcctgagattaaaggatgttgcgatcgaaagatgcagccgtttgtactactgttcttaaggcctgttttatgatggggtgttatggcgagggagtcgtagttaattgctctaatttatttatttatttttttttttgtgtgtgtttgatttttggaattctttgtattttatttgatgtttgaaaaaatgttgttaacctggtctcaatattccatgacgcgtcatggaatgtgtagtttgaaattaggaagtgggtccgcgattgtcccaacctcgctattgtcgaagcagctgcggaattaattggcataggtctcttagtttcatgcatgaccttctcatttaaaaatttccatttgagcacttgtactgaactctccatgctccgggtcctgagtggtgatgtttctgattgacgatgtagggtgattgaaaccgaggagctgattagaaacataa

SEQ ID NO: 115821 - DNA, 1036 bp, Physcomitrella patens
  Intron number 1 from transcript Pp1s159_52V6.1 (locus Pp1s 159_52V6) derived from phytozome v7.0 (chr-ID scaffold_159 ; pos 301025 to 302060)
ggcgctctgtggaggattctttcttcattacactggtgcgtgtggttggtctgtgctccagggactcgctagcctccaccttcacggtctgccggtggtcgtgcagtagtcgcttttctttacgattttttcccgtcgttggacttggttatttaattgcgattgaagcttgtttcgtgtttttttgaatgttgatttgcgtgggagtttcaagttgttgcactggagctgttgatgagctccgtgtttgttgtttttcttgtgtggttgcaattggaggttgctggtagatttctattcagtgtcttcgtatgatcgtatagttttgtgcgagcgagtttggtggtttgctgtactttttttgttgcttgaatgctgcattttagtaccatacgtgctacatgggatccagcagtaatccagtttttaatagtagacattgcagctttgcgtgagtgcgttgtgctctggttacaccgtgttttgatccgtgtctttttgtacactaggcgtaccaggattagtggtgcgcgtcgtactgtagacttgtgctaagttttattcagtgcaacgaaccttcaaatcagttggaattttggtgctttacagtgcgattagttttggcttgtgttgcagacggttggatcgagtagccttgttctaacagagttcttgtagcttgaagttggtagcaaaaatgcacttcctttaaagacctcggctgctggacaatcctctgaatgccgctgaaaacttggaattttcacgtttttcatacatttaaaggaatggagccgactttctggtttaaggcgcattttatacactcgggatcgttctgtttttctttcgacttatttctgtgtagaatttgaatattctgctctgaattattttttcacccattcgattttatacaattatttatttgttccatttgagaattttccagagcaattttagcatgtcacattggttgagctgaatgtatccagttcttgtgcaggccgaacgtgtctagtgactttcaatcaaa

SEQ ID NO: 115822 - DNA, 261 bp, Physcomitrella patens
  Intron number 4 from transcript Pp1s159_52V6.1 (locus Pp1s 159_52V6) derived from phytozome v7.0 (chr-ID scaffold_159 ; pos 303007 to 303267)
atctttggtggggaaagtaagtagatttttcttcatgaaaaattgatttgcattccgacgatcacatttacatctgcaaagtgaagattggtttgattgaatactcggttatcaacattcgaatttttgatcggcgtgctgtttcgaatttttgtttttccttaccatcattagactttgctgagttatgttgacccccccccccggattgttaattattaattgctaattttggttttcaggggttctccaaacattgaa

SEQ ID NO: 115823 - DNA, 858 bp, Physcomitrella patens
  Intron number 1 from transcript Pp1s422_16V6.1 (locus Pp1s 422_16V6) derived from phytozome v7.0 (chr-ID scaffold_422 ; pos 188935 to 189792 reverse strand)
gtcgctgtccgcagttgctacgagtgtaaggatttcgttttcctgcatgcttgaggagtgcttgcaatttctgaatcaacgctttcgatttgtgacgtcgttcacatgacaagttcgtaggtttcaacatgttctttgattggcgagttcaaacaatgtagttcgacggcgaacatgctacagtgaccacattgcagaaatcaagtttttacagttctttgtgatcattcttgactcgatggcactacaaagttcagtattcttgattgctgatcaatcatcaaatggttggatcaaccaatagtttcgacacgacggtgccgatattacctttccgagaccatacagtcatcgtacaaaattaatgatttaggcttacaagacgtcatcaactattgtaccctactgatgatcaacatgctatgcatatatccagaaattcatgtacctcatctcactggaacgagttagtgaactactgcttcacgcggcaacgtgtatattattattttttctttttttcatttttcatatttcatctcatgtatcagtttctttggagtttttttttttttttttttgttgtggtgtgagtgttctgatgagaatttccttgtgaaacacagaaatttgaatgtggttattacaatgaacccagaagctacttcgaagcgtccttcgatgggaccgggacaacgctctatcttccgatgcttggattttttttttttttttttttttttttttcccgttctataatatgttttaatcatgtgtagtacgtttctaaatctcatctgactggcatttcaaatatctgaaaattatctgtttttgtgaatgtcttgagtgcgaggc

SEQ ID NO: 115824 - DNA, 703 bp, Physcomitrella patens
  Intron number 2 from transcript Pp1s28_228V6.1 (locus Pp1s 28_228V6) derived from phytozome v7.0 (chr-ID scaffold_28; pos 1365933 to 1366635)
gaggtgttcactatgcggacctgtttcgtcgttctcgaacgacttttagaaatcaatctcgcagtgaaattcttccgtgtcttggggcacctcctcttggaaaccatgctctgtaataactgcctttatcacctatcgtgcgcctgctgcaatggataacattaccgtaaaacacttgatatgcaccctacagaatttacctaatttaactgttgtcttaatcaactcatctggacccacccacgaacaggccattcctccgggcctctgcagtggtggccgaacttctgattaatatattcttccttcgacctggaagtctggctaaatctcactagtcaccacccagaaaaaggttttacttcggtggtaaaatccttgttctaactccaagtcggctctctatgacgcacccacattgactgtgagtcaagagaacactttactgcaatccggcaaaacaatcgtaatcaaactgcctcttataaagaagttttggatccttctcgtcgaggaggatctgactttctcaacaggtggacaggttcagactagatcacaccctggcccaatccccttcgaaacatgaccttaacaaacacagatatatatcaatctccgcagactgatcagggtctctgattctgacccaaccttgaattgaaccacttaaattaaaatggcttgttcaattggcttcagg

SEQ ID NO: 115825 - DNA, 789 bp, Physcomitrella patens
  Intron number 1 from transcript Pp1s103_81V6.1 (locus Pp1s 103_81V6) derived from phytozome v7.0 (chr-ID scaffold_103 ; pos 753968 to 754756 reverse strand)
ccatttgccgttggtgtttcagctagacttggcaggtgggtttgcttgggtatcacgtttcttcattccgcgttacctttctcggagttttccgattttgcggcgtctgttagatgtgtaacatgttgtatcctattgggttggattattgttatgttagtgtgacagtgtgttgaagttggaaggttgtgttgggtttttttggttggttttttggcaataccctagttctgttttgcagttgtagtcgtttttgaaccgagtatttgagctatgtgaaatttgtgtacattgtgacgtgattgacggtttatccatctcctgcattgagccctaggtcccttgaatggttgctttatgagttgtttttttgcgaggttcgtggccgtcttcttcgtctcgtgaatcgaaggattttagttgttgctgaataattggtaggcttcgcgtgtttgcagctcctcgtgccgttgaattctgtacattcgagaacagagcggctaccgcattcagcctagggcttctttgtggatctcgaacagaagctgcgaaagaaggattggggatacgtgaacaaaacgtctttgcgctgtatgttctggacacaggctatctcacttagtggaaacgtcattgtggcctttctcgcggaacctttacgacagacttgtgagggtaaagttggtgcagcgtgagacacccaatatcatcaagtgtgaagggatctggatcggtcgtcacctttttggattgtgagaggtgcttcaggttgcgttgtggtctcgcata

SEQ ID NO: 115826 - DNA, 631 bp, Physcomitrella patens
  Intron number 1 from transcript Pp1s79_64V6.2 (locus Pp1s7 9_64V6) derived from phytozome v7.0 (chr-ID scaffold_79; p os 375601 to 376231)
gtcgtcactccggcgttcgtctggtccgaccttaggtatagcgttttgtgggtttgattgcctgagctgatttctgtttccgtttagatgcactcatctcagattcggaattatgggtgaccacaaggcgacccgattttggatttagggtagtggattgtttcagaacactttaggcccgaagtttaggggtttcctattcgctacgctcaccgtcgatattatttctgaagaggttgagtaaaatcccagatctagtgtgtgtttggcctatttttgtgtcagaatcggattgaattctcagcaggattatggtggtttgtttgtttgatttgttttgttttgttttgttttgttttttttgaggtttcagatctctatcgctgttatgtgttcgtggtgtaggattttttagagctgtattgtgaaatctggttattgttggatttttcccatccaatacgttagaatttatcaacaagctgatgccttgtgaagattctgttttttcctgggaattctgggttcttcaaatgatcagtaggttggtgctaattcctaaggctgttattgaattgcagctgatcagggctttttcccaattgaatgttcttgccgtgtttgcttgcag

SEQ ID NO: 115827 - DNA, 522 bp, Physcomitrella patens
  Intron number 1 from transcript Pp1s22_63V6.1 (locus Pp1s2 2_63V6) derived from phytozome v7.0 (chr-ID scaffold_22; p os 427329 to 427850 reverse strand)
gtgccattcatgtgagttattatctgcctaatcgtgaccttggtcgtcctgatcttggtggttataattcgtacactaaacatctcacaggccacggagaggcagcagttgcaaaccaaatcgacctctgaagaagtccctctattttatgattgtggaggtttagtgatcctagagagagattataatgttcttccacgatacctctgttgatagccatcggaattgtttcgtttctagtggttctgtttctgttgcttctatcatcagtacacgcaaattagatgttcctctgcctttggttttctgtgtagatcacaatttagccttactagggtaatgtggaagcaaaaatgaaattacaaattaattatccgccagccgcagcaagaaaagcataattgcgcaagaggtgaagttgcagtcatatcaaaaaaattggctcgttcgacagccctaatcaatgtacacggaaatcttgctgcagtgagtgttattgtaactggcacctaagtcctcaag

SEQ ID NO: 115828 - DNA, 768 bp, Physcomitrella patens
  Intron number 1 from transcript Pp1s162_33V6.1 (locus Pp1s 162_33V6) derived from phytozome v7.0 (chr-ID scaffold_162 ; pos 213227 to 213994)
ccatttattcgcaggcttccggagttcaaattctggtatgtgggatattttgtttggagatcttttctgtcttgaggtttcttcgtcttcttcttcctcttcttcctcttcttcctctttcttcttatttcctgcgactttttcatcttggttgtcattgtagtcttgatctgtttaggggttgagtcacgaccgttttccgtctgtgtatcagcttgtgaagcacggtaccgttgtggtagcaagaactttatgctgatgctgaattccgggtttatagagtgtgcatcatttgccatgttgttatatagcaccgttgtcggtagagtttgagtcggattttcttggatctctccattttaggttcactgtgaactttcgtttattttattttaattttattgaatttggtgtttttctaatgaaaaacgtggtcaagttgctctagttaatttaatgacattaaaattcgcttctagcttagattaccgggtgaatgcgcaagatcttgcagtctcgttttcatttgcttatcatacgaaccgggcagaataatcgtcattttcggtatctctttggcagcagcattgagtgatgaatgatcatcactcccttcaccgtaaaaacaataacgggcttttatgttgcgagcatgtagactccatattgctatcagaatagtcacaatgcttcccaacgataccataggtggctctgatttattttgatatgtttcatgatggagtgacgcttcggtcccgtgcaggt

SEQ ID NO: 115829 - DNA, 469 bp, Physcomitrella patens
  Intron number 1 from transcript Pp1s254_51V6.1 (locus Pp1s 254_51V6) derived from phytozome v7.0 (chr-ID scaffold_254 ; pos 317065 to 317533 reverse strand)
ttgtatttccgcttctcttgtgagatatcacagtgagctctgcttcaggggaacttctctctcatctctcatctctctgcttatgaatgaatctctgtgtgcaattggcgtcctccgaatgtccttttcatatcttgcttgcttgcttggattttcatgatcttttgattcctagttcagtgaactcggtagattttttgttaaagtaaggtgaaagaatctgaagcgaatggtttttaattttttttccttttccattttttttatttgtttttaagaacaattctgaaagggtttatattaggaagcaatgcggtgtgcaggcagagcttggggaagattgtattgtagtacaagagtcaagtgaatttaatgtttcaaaataatggtattgtcgatgaagctgatgcctggttgtgcgtctacatgttcagaattatctaattggggcatttggacccccttgcac

SEQ ID NO: 115830 - DNA, 585 bp, Physcomitrella patens
  Intron number 3 from transcript Pp1s2_242V6.1 (locus Pp1s2 _242V6) derived from phytozome v7.0 (chr-ID scaffold_2; po s 1210418 to 1211002)
gctggttctgctgtgcgcgaacggtatgctggttagtacataattctttaatagaatactctagaagcatatgtagaccccaatttctaaacaccaactaatttggcacgatgaattgtgttttgggatatgatacgattggagcataatcttgatcgtggatttgtgtcttgaagtcaaattgttgtattggtggcgcttagttgttacaccttttgttgttttaggcccctggatgtgtcttggctgcacaatttaagctgattaattcatacatgtaataaaattttaacttatcaaaaatgctaaatctattagtgattctctctctttctctccctatatatatatgctttttaaaacggttaatctacttcagatgaatatgaagtgcttgtcattaaattttatctatttttaacgtatgaagatattatagttttcacttgaataaaagataacatgaatgttagtttatggatcttatcattttcaatcaaaggtgaaatttggttgtatctcttattcttaaaccgaatatgttttgcagcattatccaggctttcctcatcgaggaacagaaga

SEQ ID NO: 115831 - DNA, 962 bp, Physcomitrella patens
  Intron number 1 from transcript Pp1s35_42V6.1 (locus Pp1s3 5_42V6) derived from phytozome v7.0 (chr-ID scaffold_35; p os 200794 to 201755)
aagaagaagctggacacacgcttcccggctgtaagtgctcaaaccctagttctgtgtattaaatgtttttgttatgtcagagtaacatattctgggaagcttagaagggaaagtggcagtgcacttatgttgcggtttaggccaagtagggacccaaaaagacggaaagacctggtgatgtgatcctaacgtcatggacaccatgaatagagctttattgggattgctatgtcacaagttccgtactaaatgacactggcgttcagaaatcgttgaaggagcgagttctttttcttctctctctcggtcacactggctaagacggcccaatagcttggttcccgtgttgaagaacgtcttcttcatgattttagttcaaagatatcgcttgtggagtgaagaaactgtttgtgaacgaatggaataatcagtgagcgactttatcattgtaacattttgaagaagcactagacggaagaaaacaaataagttcattgacgggtgcacattgagacacgagatggttcaaatcgatttttaatatgttttggaatgtggtttagagctagacaggagcaacgagttgaagatgtagcagtagagggagtgtatgttgaaagactaggagagaagccgatcatatttggtgatgtagtacctaatcggggtttgtgaagagaatacttgttattgtgctcgtgttgctttctctcttcaagtgttacctcatgcatatggcattaactaatttttgggacttgcccaatcactttgtgatatgggcatacccttttaattccaagaatcctgatattttacacaatatgtgcgtagttgccttcttacctttagcattgaacttcaagtaaaccattttcttaagctcctgatgaaggtattgttactttgctagtactgaactcgcttttctctcttcggcacaggctcgaataaagaagata

SEQ ID NO: 115832 - DNA, 839 bp, Physcomitrella patens
  Intron number 1 from transcript Pp1s71_301V6.1 (locus Pp1s 71_301V6) derived from phytozome v7.0 (chr-ID scaffold_71; pos 1463895 to 1464733)
ttgaaaattgtgtcggcaggtgagtctgtagtagagctttttcagagtaaattggtgccgagggcgatgcgctctaacaaagttcgaatctgttgggtctgctggcttagaacgtgaagctgctgttcttggcactttttgccatgcctactgagtgtgcttgaaaagcctttccctcatggttggaaacagatcattactgctcgtgaacctataccaccaaaaacgtggttttttgtggttttgaggtatttgcctgggggttcgtgtagaagatactttttgaaggtagcatgcctccaaccttttttttcaacatggaatatgtctaaaactattaataatcaaagtatttaacctggtacactaaacaaagttgccaaaatcttaatattaacgtaaagtattattacttaatgtgtattaaactcgtacttcattcgtaaatctcatattcatacgaaaacataatgtgacggtaatcaggtacaatgctcaaagtgctccttttgtgttcacttccgcggtttgtaaagtcagtagcctgtggtagtgcgaccgcacccctcccatagactacttcagaaagcaaattgactgaaacgctttcccacgatgcgaaagatatatacaagctctaggaattgaggacgctagttcattacggttacgggacaattgaactggattttggtgatgcgagtatcacaagtcttgacacgtgatggcaaacagcagttgcatgctctcttcatttagtcgtcacatctactttacacagaacttctactgatttcgtgcatgcagttatctttcgtcgtcggaacaagagctactag

SEQ ID NO: 115833 - DNA, 785 bp, Physcomitrella patens
  Intron number 2 from transcript Pp1s35_345V6.1 (locus Pp1s 35_345V6) derived from phytozome v7.0 (chr-ID scaffold_35; pos 2000318 to 2001102)
cattatttgaagtattaaacagctgacgtgaacaagtaagtgaataagagcctaggagggcatggtgtccttagacttaagggcaaggcttggggagagtgggctcttgcttagatcagaaacttatgcacaaagtatccaacatctacatttcaatttacttccatgcagtactaaatcgttcaaatcctttgaaaagagggaattagttgagagcgtaactctcttagagcatgtgatcgcatgggtgaacctcatctgtattattcatcacgagccggactaagaagagtacatttgcacaagcgtgtgctttctgacgttccccgcgtctgttttgtcgaagtttcacttttcctcgtagatatttgcgttttgtgcaagtttgtctcaggaatctctctctaatgcgtccgaagtacgaaaaggcgcggttcgaattttgcgctctctacctctctctcgcgcgctcttccaaggacttgaaatactagtgacaaggcatagcattttccgtgaaaagcctttcctacgattctactactcatcaagagctacacgaaccgcccaatttcttcgatttgattggatagattaatgtgaacgagttgcaaacatgccgtgtgcacggaatacaaatgcttgcgcgtcttttcttcgtaggaagcgcggcgaatcgcagcagacattattcattgattcagcttaatgaattttttttgaatcttgttttttatggtaggaatgcaggattcagctgagtttttgcaacacacagggggtgg

SEQ ID NO: 115834 - DNA, 850 bp, Physcomitrella patens
  Intron number 1 from transcript Pp1s2_677V6.3 (locus Pp1s2 _677V6) derived from phytozome v7.0 (chr-ID scaffold_2; po s 4138609 to 4139458)
tgtgtggtcaaagcttactgtgaactcctcgctgcgtaggtttcggtaatgttgcttgcttgtattgaatgattaccctggtactgtgataaatcccgctgcagcgcggcttttcttgttggaagtagtgtatcggtgttgagaccgactcagtgatggactggtggtgtttctatgcaccggcaatatattactgctatcaactctcaatagatttcaaagtagactcaattccttactgcgatcgattgcagtgaaactcgataatagaataaattacgttgttttatttatttttggttttggtttatcaacgagatggctcctttgcagttgtagagacttcgtgtgcgaggttcattcctttttcagtggacttcgtagccgcttggcattcgttaggtgcttcgacagagctagacatcacaactgtcacggaaagtgagcccagagtttagtctgttcttcttctctccttatcgccttacgtgcagtagaatactcaaagttggagatcatgtcagtctgggtcctacctcattgaatttcttctgggaagtatatttagaatcatgtttggaattggcagagtgattactacgattgggtgtgtttggacgtgttcacatggctttcatcgaggtcggagtctcattttcttggcagtccaggaaatggaagagggacggacgtggactttccgaaagcgatagcaatgagaagcaactcacagtgtgtgattactgatttggatttggaatcaatgctgggttggagagcctcttgattgacgagcggcggttgtgtgtgtgttggacttgggttcaggtagattgtaggatcgctcgcg

SEQ ID NO: 115835 - DNA, 767 bp, Physcomitrella patens
  Intron number 2 from transcript Pp1s70_58V6.2 (locus Pp1s7 0_58V6) derived from phytozome v7.0 (chr-ID scaffold_70; p os 366761 to 367527 reverse strand)
tcacaaggtagtaattcaaaatcaagtcgaccatttaggttgtgttattgaatgtggtttttgttgatgaatgtcgtcaggtttcgtgattttcttcccctctgctccgtcacatctttatttaaaacgtgctactgttgtggtttatttttatgttctatccttgccgtgtaattttctcatactgcatgcactgcattatatgtgacaatgcgtccgagtgattggttatatttctccttatttccaactgcgtattcgaactcaatctacgtcaaagttcggtggagagaaatgaatttggtccgattgcaaaatattatgacctgttcactgtggggatttcgagatcatatgttcactaagacttattgcatggcattgaaggggagaagatttagaggacgattcgccaatcctaattttttatctttatcttagaaataagtattatacagtgtggatgatgtttgatccttcaagattagttaacggagtctcgaaggtcaggtgtataccttacaaatctccaggtttttgagcacacactactgtgactttgtagaatcccagtttcaacctcacgatttcgggaaaatgaaggtcacattatggcaattattcattagttaaactacaagtggatgtgttttggtggattgctttgattatgtgcagttggcagcgtgcctcagaatgttctataatgatttggacgctcttattgtgcagcgggtttccaaggaggcgagttgagaccatcaagt

SEQ ID NO: 115836 - DNA, 732 bp, Physcomitrella patens
  Intron number 1 from transcript Pp1s387_50V6.1 (locus Pp1s 387_50V6) derived from phytozome v7.0 (chr-ID scaffold_387 ; pos 292842 to 293573 reverse strand)
tactggagagctggaaagcataaagatcgggcagtgtacgtttccgtgctttgaagagttgtttgccgagattctcgaattgttggtggccttgtaattcggaatgctcgtgtagcctcaattctggacgagtaggattgtgacagtgtgtctcagcttagtggaatgtcttcctcagttgagaatttgcatcggtagaggagagcgggtacatcggggttgacgaggaggcaatttaagtggtttgctcctgcacatgcccaaccagggattctaataatcatcgtatggacatgtgaatatgcaagtagtttttgggcatcctgtaagggtgttacaagattctgtgattatcagcctcttgtcgggtttaacgtttctcatgcagcacggttggagacattcttctcgctgtcaggattcgtagtagttgcatattcttgatttgtcacatttttatttttgatcttagttttttatttttgataatcgtctcggttatgtgtcttctctttgtcgtatctattgatatgcgtattctctttagataagctcggttgttgatgcatcatttgaatttctagtattggccattctgaaaaacgagaagtttgtacattggtttgtgcgtaaattacataaatctgtggtttataaatcgctgacttaacaaactcctggtgcttataacgcgcagttttgatttgctgcatcggaagaatccattcgggg

SEQ ID NO: 115837 - DNA, 817 bp, Physcomitrella patens
  Intron number 1 from transcript Pp1s38_173V6.1 (locus Pp1s 38_173V6) derived from phytozome v7.0 (chr-ID scaffold_38; pos 1067956 to 1068772 reverse strand)
attctgctcttaccgctttttacgacgctgaacgtgttcgtttgctattctcttttaatttttttcgagtctttctggaatcatagaagcagatgaggattagattgtcattgataaaccttggctcatgataactttttcaaaaaaaagtttccgaagcggtttcgaagtggtcgtaacggtttttggacaagcatgttgttggttagggtcaactccacccgcttgtttcggtctgtagcaagtactatttgccagtacacctcgtttggtgctttgagtattgcaaattgggattgcaaaacacagggatgtgaggcacgcatagcagcgtttctgcttagttgattgtgtctcattgtttgaatctgtagaagtcaaggatttgtgtaaccgttttcttaggaaacggttcagagaagaagtttttaagggttttcttcgatcacgagttggtagatttgcttccgttgtcactacatgtgttgtcgatgttcgaaggtttgagcgtaattttgaaagattgcttgtgcatggaatagtattttcgtggccatcatgttgctgtctctggtttgaacagtttcataatacgaatgtgtctaccttatctttagcatttacagaggcttggcagtagctagtttttttcctcctgatactgcgaatgtcatgtggaagatgtgttggttttgagttacgtgtgttggagttagcacttagtgttggaagttaatggatatgacggagtactttattgttagtgggatcttagcgggtttcaaaccgtgtgcaggaatcttacaaaattaaaacg

SEQ ID NO: 115838 - DNA, 886 bp, Physcomitrella patens
  Intron number 1 from transcript Pp1s309_57V6.1 (locus Pp1s 309_57V6) derived from phytozome v7.0 (chr-ID scaffold_309 ; pos 257632 to 258517)
gcagttctttgcgtgcgtttcttcttcttcccgaggtcagcggtgttgcccttcccttctaaccctaggttctcttgtttgaaagggctttgcgattatgttaactttgtaggtttcgcgtgtttgtgtttgattgggtgtttgtttctagtagaattccttgttccagtccggtgggttgtagttcattttcacgtatgatacatctttaagaaggctgacgttttgggctttccggtcagtttcgtaaggggtatggctaacctctttgctgctaattttgcgtctctgcaaggctcgttagttagaattcaagtgccgcgctgttgttagggttgagctggtccagagtgccaacttgttacgtttcattacgtgttggcattctgcgttaaatagcttcggcatttactccaagggtcacctgcaaagggctgtgaaatctagatagtcggggtcgttgataggaacctcaaaagtgccttttttttttttttgttttttttttgttttaaatgtttaaaattcttgctttaatattcatgtgataacaacaaattttctcattttagggccactctgccgtcgaagtaactttacatttttcaaagtttcctttcacaccaatagaaactaagatagtggtgtaatttccacttgattgcaagaatctttcatattttctgatatgcttggttcagtctgatttttcttcattgcattttttactccttttcattaattgcatgatggggtatagagttcaaggatacaaattgattcatctcaattgtatgagatcaaaatgagtctcgctctccataagaaccgataggcggattgactctagtttcaatgtttgtttacactggcaggcctaaaaggg

SEQ ID NO: 115839 - DNA, 535 bp, Physcomitrella patens
  Intron number 1 from transcript Pp1s36_179V6.1 (locus Pp1s 36_179V6) derived from phytozome v7.0 (chr-ID scaffold_36; pos 1075143 to 1075677 reverse strand)
aattctcactctaggttatcacttgctattttagttgtgtaaagaagagtcgtctattgcatggtgtttttctctgtcattgtctagtagtctcttcgtaccaacaatccaaggttttgagctgcactatgaaaatacgaagtgccttaatgttgagttattgtgcataataaatatgctgtccttcttgtcctgttgtgccgctttcaaactcgtgacaaagagagctgggagctgtgcgggtttctcgattctgaggatcttgtttatttggatggcatgttaacacacttggaactgacctttagaaaattacgttcaaagatggatatcacatatttcgtgcaggtgtaaggcttgtgagcgggagagagagagagagagagagagaaagtccaagtgatggttatcacttctaaagctgtaatggccagttttaacacttgtagctggaccaggcagatttaatggcatttattaatttttggcctcgcttcactttgcttttctcattacttgatgtgcagtcgatcac

SEQ ID NO: 115840 - DNA, 660 bp, Physcomitrella patens
  Intron number 1 from transcript Pp1s157_3V6.1 (locus Pp1s1 57_3V6) derived from phytozome v7.0 (chr-ID scaffold_157; pos 6150 to 6809)
gccggcacggtgtgtcgtttaactccaactccaatttcatatcaagcatggggcatcgagtagcacaagcaccggcggagcgtttcacggatggttgcctctttcacattgattacgaattcatagttacttcttgtatatattttgagatcacttattttcgtgcaagtcgtagtttttactcctttgttttatgttgacaataaaacttaagtagttttggatttttttgtagttctttaatcctattgcaacatattttacgtttttttttggttatttctgagtaaatgtggattacatccaacctttactcgtctttcattagagtgcgacctccttttgcgtggaattttgcagttcttttttttttattattattctagagttaggggtttggagttgagattgcttattttcttgttgatgagctttgcaactgttggaataacgagtgaattcaggtctagaggcgtgttgagtgatttgaagatcctggatgaagcatttttcacctttgaggcgtagtgtgtgatataagccattctttgcttttctgtcttcttgctttcaattgactcttgtctccttacaagcgtgattgctttcatgttgggcaatacagttaggaaaagctattttcaagctagcagctctggt

SEQ ID NO: 115841 - DNA, 808 bp, Physcomitrella patens
  Intron number 1 from transcript Pp1s32_243V6.1 (locus Pp1s 32_243V6) derived from phytozome v7.0 (chr-ID scaffold_32; pos 1764030 to 1764837 reverse strand)
gggatattgaagtgaagacagacctctgtgtgcctgtaagtttgaaaatttggtgctcctgcgcacatttgaatgcgagtcattgtgtcagtggaatgcgcacaactatcagacaaatttctggttgattaaacttaaatgctcgtttcactatttggacatggctgggtgtgcattttctgtgaaaacgtcgtcgttgagtattcatagaattgtagttcgacaatttcacgaagtcggagatacggctttagatagaagcttcaagttggatcccggttcttgtttaaaacgatatttgaatgcttcacaagcttttctgctaaaatataattgagtttgttttctatcgctatcgtgctgcattctaaattgaaccttaaaatttactgtccggtgtcacgtacagattctcacagctcgcgttgccgtgagatttttagttgtcgaagaaaaacgatccttgatatctacacatgcgtttgaactttgtcaatgtccaatatataaagttttttttatctgtgtttgtcagacttcgaaatttagttcaatggggaccagctctagtttgtcaccccatcgcaagtcttctaactgaagtgtcgcacaagcattgcaatttgaggatgttttatttacctttaaactgcagagagcagcagtgaagggtactatgtcattgagagatataatttgcacttatgaggatttgtaccttccttgcattgtcctcgatacatgtttgagaatttctattgctattcttgagttaaaaattaatgtgctagctatgctttcgtgcagt

SEQ ID NO: 115842 - DNA, 429 bp, Physcomitrella patens
  Intron number 2 from transcript Pp1s178_123V6.1 (locus Pp1 s178_123V6) derived from phytozome v7.0 (chr-ID scaffold_1 78; pos 889356 to 889784 reverse strand)
gaccgtgagttggctctcccgtcttctcttgcagctgttaatcttgcagatattcacaatttcgcagactcttgaaattgtgtagggacaagccgaggctttcttagtttctgcatgtacatagttggcatgtctaatcatttctaggatgttttgaaatagtgggaaatcttaatgtgacactgggggttacagcttagaagaatgcaggtgctccagattttctttgagtagttattaacaaagaacgacgtcagttaatcaagtttcgtgtctctgtatttacccttggtctcttttttgttggcagcccaaatttagataccgatttgagcaatgttcggtgctgatgtagccacatttagagtctttcttggaaattgaattacccgtaacacatagtgaataactgcaggacctgtcggtggc

SEQ ID NO: 115843 - DNA, 745 bp, Physcomitrella patens
  Intron number 1 from transcript Pp1s363_26V6.2 (locus Pp1s 363_26V6) derived from phytozome v7.0 (chr-ID scaffold_363 ; pos 156586 to 157330)
tgcggaagttaacagagactgacaggagcagacctgtaaggcttcttcgggcttacccgcatggtttgttttggcgatttttccgtatcttaaaaatcaaaaaatataagaaacaagtcaaatcagtactctccttgccgtggtttgtgcatgatttaggttttggtctgtcgagggaagcgtttgccatcttcgttcatatgggattttaacatttcctggggttgaagtgacttggaggccgacttagaagctaatccccatgtgacatacatcgtggatatttgcgatcgtcctccgatgttctcatcagggttgtgagttagaattccggattgtaagtggatgtttgtgtggagttgagtaggtcgctgttcacacttgcctctcacaaattagtaaagtctgcagcattttgaacaagctgctgtagtttactgacttacatcatgcggtgaaaatgttcacacttgcaaattttgggttatgggagtgctctctatggaacgggtcagtgcgtttgtggtatactgatccttttctgattcacagaatagggtttcatattatttttcaagtttaataagcaaccttgtgaatgtttcattctatttacgaaaacccggcgcaggttatacttacctgtttctggtcggtattgtaagatttgaggttttgaaatggacccttaaaacctctgttcttatcttataaatgttcaggtgacctgcgtgtggctctcgca

SEQ ID NO: 115844 - DNA, 342 bp, Physcomitrella patens
  Intron number 3 from transcript Pp1s358_17V6.1 (locus Pp1s 358_17V6) derived from phytozome v7.0 (chr-ID scaffold_358 ; pos 115731 to 116072 reverse strand)
cccttgaaccagaggttcttccttctttctgataggtatttcagtgatcctatctttgaattttgatgttatttttattttttgaaagatgattataggcgtcttcttgctttgtgctgaaatcttttgccctcaactgctggtgcaactcatttatttgccacagaaacaagttttcaattttagaaataaaagttacatcttggaaaaccaattgctggtaatgagcatcttcaacgaattaccgtcatgtgctgttatggtgatcctcatacaatcttttgcaatgagcttgcttgtcttgcagttgcatcccgctctataatttcacacacatctaca

SEQ ID NO: 115845 - DNA, 292 bp, Physcomitrella patens
  Intron number 1 from transcript Pp1s358_17V6.1 (locus Pp1s 358_17V6) derived from phytozome v7.0 (chr-ID scaffold_358 ; pos 116409 to 116700 reverse strand)
tggctctggacatcttgtggaatcaattttttgaggtaagcagtaacgcacctactaatttgttttttggtatagaagtgaatgtctattgcgaggactctgaccctcatagtatagaatggttcttcatgacgataaagtctaggcttattgactgcccatttattgttcttaattaccacacacattctcccagttgtgaagaatttattagtttaagttgatgtcatccaaaagggaagatggatcgcaatagaaaataaatattttgagttacaggaagtcgaagaac

SEQ ID NO: 115846 - DNA, 797 bp, Physcomitrella patens
  Intron number 1 from transcript Pp1s99_189V6.2 (locus Pp1s 99_189V6) derived from phytozome v7.0 (chr-ID scaffold_99; pos 1101223 to 1102019 reverse strand)
gaaataaaggcacgatttcaattctattgtttttatcgttacaagtatctctcacggcttgaaaatatcgctattctatgaacggtctagaaagagtgtcgtggatcattaaatggtgagagatcatttcttctttctccccatcatcaataattaacttcttagtgactaatttgttttgttttgatttttaagtttattgaaatacattcctgcaatctctctctctctctctctctctctcactcttgctctcgcgataatccaagctattactctttccctgagtttcctttctgttgtatctacctaatctaagcgctgttttcagctcagattggagttcgttgttcaatgatctttaacaggcattccaaatctttttgttttgatttcacaccgagatattttgaccaaaatttcaatatttccttggaaaagtgggatggcaacagaacctcactagctttttgtgctaagggagcaacattatgttttgtcctcaacctatcttgttttactctttatctgcatatgaagcagaggttcgagtcgtgaagttaatgtgtattgattacgcttcctagtcgaatttgtcttacttattccttagaggtgtaatctgattcattaccatcttcctgaataattttataaactccatggtaacattcaatttgaccaagaggaacaagtttgtcttattcagcgtagctggctgttgtaatgtttgggggggactacagttttctgaaacttttatcaaacgtttggaagagtgccgatgcaggtggccc

SEQ ID NO: 115847 - DNA, 936 bp, Physcomitrella patens
  Intron number 1 from transcript Pp1s90_158V6.1 (locus Pp1s 90_158V6) derived from phytozome v7.0 (chr-ID scaffold_90; pos 1044178 to 1045113 reverse strand)
tggattactgtggcgtccgtgttctaaagattttggtaaggacatgaggtgttgtatggatactttggaaaccggcgaattttttcattcgtgcggtggagaggtacttgtgtcatgagacggagttgagtggacgcggggattggaacggtttgctgcgttttgattcacgatcgtcgttacggtatgtacgatcatgaatttgggtagtttggtgcttttgcaagtggggttaaagttaagtgagattattctggagtttggccagggtgacagagttgagttcaattgttggagcgtagttagcacgtatcatacggtaggctggagattttaggttcgaaagggtgcgagttgctccacattgtcgccgtgatatgtttaagttattgttttctaagttttgactactgcgagttgaaattttgtctcggcgaggcagggttgttgttgagttggtgggtggaattcacgattttggagaggttcttgaaatgtagtacaatgtttagaggtgggtgtttggaattcgggtagcggtggaggctgaagtcggtgcagtatataaatctggtacttgttaattgtattgtccaccagcatctccatctgctcggtggatggatgggcgctgaatacgagattttgactgaagtgcttgcttgctttcgtcattcttgtgtctcacaacatgatccatctctaccgcgaaaaccttggttttgttttgttttgttttttgtttcgttgttgttcacaatggagctgtagatgttgcacacagagaactcggttgttactaagtggtgttggaggatggagaggattctcttcgctggctaattgttttcaattgatgtgggttcttgtgacttcaagcttcatatatactcatcaaattcgtcctgtgtttggtattatatgggcgcagctatt

SEQ ID NO: 115848 - DNA, 806 bp, Physcomitrella patens
  Intron number 1 from transcript Pp1s32_210V6.1 (locus Pp1s 32_210V6) derived from phytozome v7.0 (chr-ID scaffold_32; pos 1460357 to 1461162 reverse strand)
ttgccgtgcagttcgtttgcggctctggttgttaggtacgtaggtccagacggttgtgatgaagcttgtgttcttgttcgcgtgcagatgaagtttggttgcctttgctggttcgtaatttgacctagtttggtgtgattgtgtgatggtaacgttgtgttactcttgttgcgttcgtgcagcggaatgcactggtaggtgatagtcttagctcggttaatgcgagtacttgggggatttcgtaaaaaataactgttgaattagggtagtgtagataatttgataattactggttaattgggttttgtagcggggtctaggccggagttactcgcgaaagtatggatagaagaagaagtgatatgtaacttgcgggtatgtatcgtcttcctggcttagaagtagaatttgacaatactggttgaaaggcttttatgtccttgcatggatctgggatttgagcgttttggaactgtttgttgttaaattctaggaatgttatgattgattggagttagggggaaatttgaagggagtctgctattctgctcaaccggttcagggatgggatgattgcgggagccgtttaggactgtgaattgatagctgcaatataggtaggaagagtttattcaggaaacgatacccaacttttctgttcatttactccgctacctttacgttctctaatttatttttccatatgacctcgtctggcctattcgtgcgaacatgaaagcgcagacgcctgacgaattttgttggacacagctgagtgtaggtcatctaacttttcttttttcttt

SEQ ID NO: 115849 - DNA, 860 bp, Physcomitrella patens
  Intron number 1 from transcript Pp1s93_52V6.2 (locus Pp1s9 3_52V6) derived from phytozome v7.0 (chr-ID scaffold_93; p os 641043 to 641902)
attctggttacatttgcacggccgtcgtggggaaggtgtgtgagcatgagcttgaagtgggtttttgtttgggaggtcgaagtgcttttaccttgtgaaggatgtcagagacttgtgttcgatgtcagtggccttgtgtagagtattgtgctggaagttggctttgctttggtcgttgagatgtaattacctggacttgttgtgtgttccttcgctccttggtgatgagtttggcctcaattcatcttcagcctcaagagtacaatgtggctattctctacctaacctagctgtagtcaagtaatttgttagattgttaagtcgggtgcaaggatcttaaaccaagctccatcaggcgattcaaatctttgtgcttacagtacaattaggaatttggagcaatctctgtctatgtctgctcaatcactcggctttgtgcgatgattttgtggattttgaaatgctttgccacgcttaccagttcactctaataattggttgcttgcattctggatactttattgttcatttgaatagcccttgtgatcaacctgctattttaggttttgattgagttaccgtagagaaagattatcaagctaaaagacttgctgcctttgatgtttcatattttgtgatgtgctgatattggatttattcttttcggattgtgctgttcatacgtcatttgcgacaatttggaagtatccctggcttttctctttccactctcttgcctcaggcgccaggatacttgcaacccctaatcttaaagtcccaacggtgacttatttctaaattcagtagcctcatgtacgtgtctgacgcttttttgtttcacttgcagcagctgaattgcg

SEQ ID NO: 115850 - DNA, 1028 bp, Physcomitrella patens
  Intron number 1 from transcript Pp1s221_46V6.1 (locus Pp1s 221_46V6) derived from phytozome v7.0 (chr-ID scaffold_221 ; pos 473035 to 474062 reverse strand)
tggggagaatttgaagttcttcgaggtttgttcacttgcgcttcgacctcgcttggttgtgcgtttgtataattttctttaaagaattcttttcatttttgagagaaaattaacacgaattagtatttttcatgagaaagccactgtgatcaggatgctgtcgggttttttcttgtccaccggcatgcacagagccaacgtatacgggagatttacggttgcagggaagtctgtaggaggggcgttcttgtcattgtcagcagaaaagtttgcttgaaaggtgttgctcagttactgctttcatgtgagcatgcgtcgcgcgctttggacacttacctgctacgctgtgctgtttttggtttttggtgtcttgtattttttttaaaattaggaaaatgtatgcttcgtgacgcgtctctatccacgtttggtagtgagaaattatttaaaaagcttgggtgttggacgtattcatctgaagtttctgctctacattactaaaaatttgctagccccgcggagaggacgttcttgttgttatttgcccaagtctttgtctggtaaacactcctcgtggctctacgacatctatctgtcgtctcttctgttcatgtttcttgatattattgagctgctgttcagtgttggctctgtgctttggctagtactgatgactgttacactatgaaccacacctgctctgctttgattaacgaagactcacaataactatggagagtaacggagttgtaagttctgatcagcagcaataatatcaataatgattatgctcagaatgataatagcaacatctgcacgcaacgtttcgaatcgtgtgcaagttcatgtactgtttacgacacgtttttgaagtcttcttcgtcagttttatttattttatctatgttttaaaataaattatttttgttaccgttcttccaacgatttctcaaagaccaatgctgacgtagctactcgcctttgattatgcagggggacctgtgcaaggtggacgacatacagaaggt

SEQ ID NO: 115851 - DNA, 733 bp, Physcomitrella patens
  Intron number 1 from transcript Pp1s94_165V6.1 (locus Pp1s 94_165V6) derived from phytozome v7.0 (chr-ID scaffold_94; pos 1387171 to 1387903 reverse strand)
ctcctgccagacaggttcaatatggcctgacgtcattagatttttgttaattctcgtcttcacgatttttcaacaatgttcagttgtcatgcctgctgatatgggaggctgcattgcttcagggattgaccccaattgctggtgcaacgttagcatcacgaaaggacaagctaggagcctcctgaattgcattcttcaggtgtataattacttagttttgtaagctgttttactaccctaaacccttgactaccttggagttttttcggtggggcaagatcagcttagagctcagcgttgcaagatctgccactgcctttgtcatagtattctagtgaaagggtaggccttttaaacaaatcttcgatttccctgagcatctttttgttgtttgtaccgtattttaatcttcacgtatctaaaggtgtatgttaagggatcaaaagccaccctatccccccccccctcctgggcaaccggtggattttctgatttctagtattgaagttgtgaggacttcttgcaagataccaagaaagcagatattcctgaggttctgaagaggcctaagtgctcagtaatttcaaaacttggtgctcgcaatgatgtgtcttatattggtctgatcttcagataagaagctgatgaatacagtgtgaagtggcccttattctacattttttcctgtcgagttgcagggcaaaggttggatttggtgttctcacggatatcc

SEQ ID NO: 115852 - DNA, 449 bp, Physcomitrella patens
  Intron number 2 from transcript Pp1s173_101V6.1 (locus Pp1 s173_101V6) derived from phytozome v7.0 (chr-ID scaffold_1 73; pos 555158 to 555606)
agaagcccaacaaaccgattggtcctacttttgatgtgagattctactttgttttgtgagtctccaaagttcagtgtcaggctaggaatttgaggcggacttagtataaatgattattccgctttctttcctcttcactgatgacctaactttctatgtatgtttgttttgaaattaaccggaacacatagggtagcagtatctgtacacgatatttgtgtcttttccgcatcaaagtattcttaattctatattctgaaacgtgatcacatgtattgacttaattaagaaagagacgaaaaatacatggtcatcactatgtagatccgctattaccgcagttgggggtgaagatgaaggtttgtgtgttacgtgactgttttgtgcagcattttaactaggagatgtatgtagttgtcagctgagcaggttacgcttttacaactaga

SEQ ID NO: 115853 - DNA, 981 bp, Physcomitrella patens
  Intron number 1 from transcript Pp1s84_280V6.1 (locus Pp1s 84_280V6) derived from phytozome v7.0 (chr-ID scaffold_84; pos 1445363 to 1446343 reverse strand)
attcgacatcttccgctcgcggcattcctcctcaggtgtgccatggttgcttttgtttgatcccgttgtgagtttcgatgtacaggggtttgggtgaagatggcggacatgaggtgtgcgatgtgaggatttttatgtcgttgagcgggcagatgatcggtgcggagcttcgggttagaaccctggtggcgagatctgcgagttcggtgcgagtgtggcatgatcagcggtgtttttgatttggacctggattttagtggttgtgaattgtgaggtgacggtgaaggggattgcattcgtggttgggattggcgatgctagctccgatcttgcagcgatcgtatgcttgacttaggtttgtggagaatattcggttgaaatgagtgattgtatcggtatgaggtagagtagaattggtacacttagagtttactttgaaagagggaatttattgtctgtgtttcacgtcgtcggcccgaatcggagtaatttagggtttctggccatttttctattgtcacctgttttcgtcttccctccctttattccaccagttaccttgtaatgagagtttctgcataagtgggttatccaaccatcgtgtcatgatctgagcttgttcccttgcatggagcccatccatatgttgtcctttcctcccatttgttttgttatttcgatatttttttaattgtcgacgagtactgttcaatgatcgtatgtttttttcgatgctggtaaattgcgataccattatgtgctttgagttccacttgggtctaccagcgtatgatctcgagcagagtgtgtcttaatttcagatcagataaggactgattactgaatggttgttctatgattgtgtactttttatttatttatttttcgttttgaagttccttttttatttagtttaattggtgttttagtaaaatttgtttgcttcttttctgactaatatatttgtatgtcaggccttcg

SEQ ID NO: 115854 - DNA, 914 bp, Physcomitrella patens
  Intron number 1 from transcript Pp1s60_178V6.1 (locus Pp1s 60_178V6) derived from phytozome v7.0 (chr-ID scaffold_60; pos 1103906 to 1104819 reverse strand)
atcccgcgcaggtcctcgctcacgaatttccagaggtatgttttttttttcctctcattttcgatcatataaatcctagtgaaatagagaagagaacaatgaaattttccatgccgtattgtcccgatatcccttgctgcacgatttcatttggtctcaactttacgttcgcagctgaatttttttgcggttctagtgaaatggactgtgagcaatcggattcttgcattttcgtttaataaagagaggaaaattttggcgttgcgttggtttgttgagtactttctagttctgtcgtaataagcatttgagacttgttccgttgccattcgcgctgtccacatttgaattcacttgttttggtactttgtaaagacattctatggcctgattaaggacgtgaggactttgcgtgttactgtttgtatgtgttctgatctcagttttttaagattctcagagcatgtgacttttgcgagtttgtataatctgggcgattgatggatgatcagaattcttctgtagatacttcatatcttttaagtcacagtattctacttttggtgtaaatttatgcaatcacaggtcgtatcctcggctattttgttcctgagtagtgatttgtacgtaccttttgtaagtatcgagtacgggtccttaggtgttggacgcggcaagggatatcgtattctttggcaccttgttgcaattcttgcagaaagagatcgaggtttttttgtgatggtgcaagattttgatttctggaatttgtggagtgatggttgccaagagcagcttctgtggttaattctacaaatttgtgagttggaaggcttcaaaattgctaacattttgttgtgctgccttgattgtttgtagtctctcttcacatacacagaaaggtaaacctattt

SEQ ID NO: 115855 - DNA, 900 bp, Physcomitrella patens
  Intron number 1 from transcript Pp1s332_29V6.2 (locus Pp1s 332_29V6) derived from phytozome v7.0 (chr-ID scaffold_332 ; pos 114974 to 115873 reverse strand)
agtttcgagtttacggtgtgctacgcaggtttgttattgtgcttatctcatctcatctcatcttatctacttatttactcacttttgttgagtatgaaatgttctacctgttttttgttcttaaattgcttgaaggaattgtgtcatgagggtttggttggagataggtgttgtgcttttcctagccaagatttattacggaaagtaagttatgcctgcgtgctaggtatggtttatttgctcgacgcggctgcgggctatttttgtggaggtctatgtgcttagtttttggtttgatgacgctttgattaatcttttttttcggacagtaggatggtttcttggctaagatccccacttttcttatcttaaacctatcatttttttgtggtatacacttgttcctcctttaaaagccttgttagagaaataataatcgtcagttttagaaactcgcatggaagaagcatttctgaaagctctactgatctgttgcccgaatactcccatgaaggctattggaactagggtccacatctcaaagactgatggagatgagtacaacttgtctaacttgtcaggaaggaatcgtctacaagttgtacataagatttcacagttctgtcccagtgattcgtctctcatgcaaggactgtcctccttttgtcttgaaaatctgctgctgaaagccattcctgtctgacccatggatttcagtgtgtgggttggccgcaaaccgccgggctttgcttttatcgaatttgaagatcgaagagatgcagatgatgccattcgtgccttgaatggtatgttcacgttttgccttgtcatggttttgatgtactgtatgtatctggtgacacagtgtttgggtagcccggaaaccggcggggtttgctt

SEQ ID NO: 115856 - DNA, 718 bp, Physcomitrella patens
  Intron number 3 from transcript Pp1s241_136V6.1 (locus Pp1 s241_136V6) derived from phytozome v7.0 (chr-ID scaffold_2 41; pos 689674 to 690391)
ttcacattttggcacagcaagtgaaggatcttcaggtttggataacatggattgatcatatatcttgcatgcctcctacactataacaaccaaaagaaatattatttttcaaaacatcaaacaggctcttccaaactgtttgcttcttacaagggccctgtattattattctgtaattatatatatatatatatatatatatatacctgcaatatttggtgttcaaaatcaaatgtctatatccacacaaacacacaaaagcttatacttccagattatgacttgttgaatgaattatgttcatttattaatgttattttcatccttaaaatttttgtattagaaattttcacaaatgaaaacttcaataatgaatagctaaactctttcataaatgataaaatcactataccatcaacaactacatcagcataaaaacatcactaacaaagattgtactattcttgctaattgcttgatcaaatataaagtttagtaatctgagtgtaggaaaaatccaattttgtgacttgcagtgttcatttgatttgaggaagggttaattctatgcagtgattaataactctctctgaagcaccatacttttattcctttgtttacatggatgatagttgctacccactgtgtttagctctgaaacccatcttcatgtcatgcataattttttgtcatgatggtgtagggacaagttgcctac

SEQ ID NO: 115857 - DNA, 495 bp, Physcomitrella patens
  Intron number 1 from transcript Pp1s100_240V6.1 (locus Pp1 s100_240V6) derived from phytozome v7.0 (chr-ID scaffold_1 00; pos 1347898 to 1348392)
tggcgtgatttgagactcttgcgcaattgggggaggtgtgtgcattttccatctaagaaatggctcttcatttatgattttgaaacattgaattttgatctgtttgaatttgcgatttctgcatggtatgcgtgttactgcacaatcagatcgagaattattttcagtttttgtggtaacatggtccgtgttggttttgtctacatcgtctgatcagaactcgtgcattctaaaagaattctttgtttccactgaagtgatattctctatcacatgttaagtcccagtgaaaagcacgtacactacatggatatactcttgaagtctctcgctgttcaattgctgtttgtttttttaatataagcttccactaacgcaaccaatctgaaagccaatttcgtttcagcaatgcacattgacaggtatatcagatttataaatcctcttagaacaagtccctgacattcccttttgtatggcagaagaaaattggag

SEQ ID NO: 115858 - DNA, 1027 bp, Physcomitrella patens
  Intron number 1 from transcript Pp1s379_20V6.1 (locus Pp1s 379_20V6) derived from phytozome v7.0 (chr-ID scaffold_379 ; pos 174502 to 175528 reverse strand)
ggaaaaggcgaggtattgcgtccttccctttcctctgctttccctgttgggtatgtcgatggcatgcatcttttcattacgcaatcatgttcactagaagcactagaatgttgcagatatatagggctgatcctacgatgctattgctgcgggtgattctatgtggttgatacaatctagatatttttatgttgactgctatttttgaaagtgatcttgttgatgtcactgtatgttaaccagctattttagtctttgaatgatcaaattgaggccaatcgttacgtatgagaccattactagtcatacttggcaaaatgtcatatctagttcggaccacggggttacgattcccaattatttacttcctcttcgggagttgtttaataagtctcttcacaaagtctttccatataaccccaaaatgcaatgtctacacgaaacctcgaatttttgtggcatatttatttctttgcaggttttctgcaacaatagcttatagttgtgaaaattgtgtcaattttgcgaaatacgcatcatggtggtcctcctcgtgtttacctcttgctatttgtgataccatttttctctgctatcagctttatgttttttcatacggttgctggaagtaggatttgaaattatcatactctaaacgttgcttcatcttaaatatctaaggccttctagtcatgggttttgagttcggcacttttgttgtgttacacctattaaaagggttgtatcatccataagttggtgaaaatttaattagaatgttttcaattgttacgaacctagaatgatgttgcacagccgaaattaacgcgtacatgtatgcccatagttgtagctggtcgtatgtgcttgttagtattctccagaacatccccatcggaatctaacgtatgactagggagtagtttaggaccagcaatagaagctatttgtgtacttgcaactgaatgggtgttgtctatgctggtgtgatgcagtcctcttcaaagaaagtgatcactaaagaaga

SEQ ID NO: 115859 - DNA, 774 bp, Physcomitrella patens
  Intron number 1 from transcript Pp1s276_110V6.1 (locus Pp1 s276_110V6) derived from phytozome v7.0 (chr-ID scaffold_2 76; pos 581407 to 582180)
gagccgccgtcgcgaatcatttctctagcaaggcactgtgatttcctttgttttttttttacccaggctctttcatgagatttgagtcatggtttgttgtttttgtttctgtttgttctcgtcgtgtcaatgcgatgggtttttatttgcattttctgagttttgcttctttgattcaattcattcaatttccgtgttttattttttcccgttttttctttcacttaataaacctccgttaagaatgcagcgttgacgagcggtgctagacccgcccatcctgataagtccaataacattgtatgaagggctcaaattctttcttctccgtaagaggcgtagttcagtttgcagagcacatattttgcgggcatgaagctgattgtctccaattaaataagtaaaatattagtataagtgcttggactaaccactcttcataagagctgctggagatctctttatgcttcgcacttcaacttggctttggaaacctttatccgaaattgagattagtggcaatgagtggaaaattgcgatcggaaacgaagttttgcgcaggttcagcgcaagttcggcgctagttaatttttttttatgtagtactccccgtacctgagttcttagcatttatcacgacgcgatttttgtcactgttaatgttgctaaacacttccgtgaattgtcttcatgggttggtttacttgttatcgtatagtaatcgtgataatgcgatacaatacaggaggttcggagggggggtcttgtcgagtg

SEQ ID NO: 115860 - DNA, 617 bp, Physcomitrella patens
  Intron number 1 from transcript Pp1s44_287V6.1 (locus Pp1s 44_287V6) derived from phytozome v7.0 (chr-ID scaffold_44; pos 1821825 to 1822441 reverse strand)
aggaactccaacttgcgattgtcagtccaccgaaggtattcaaaaactgatctacccactattcggaagccctcgttgaacttgttttctataaactcactagccgccagttcgatttgctcatcgagtttagtatctccagttctttcgccggttctcaattcttcattgatctccggagccccgcttattagaacgagtaatcagacctctcccccgtctgagattccacaggaatgcaacttacaaaggaagtcaagatttcagggcccctggactccagattctaggctcggcagtggttgtagaaccatgcaagtgccatggctttgttttgtttgatccagggtggtgagtggttaaaaaaccaaaaaactaaaacaaagctcaacgccgcttcgtcttatttctaccgatcaacatctcgtaaagtgaactcgttgtattcctgtcatttgtcggttttttctttttctttttcactattcacttttcaagagtaagataatcttcttctggttccagttcctcagcgatggctgtaaacaaacttgctgaacttatttctgctaataatagcagtaacacataagaagaaggagacgaagatctcccaa

SEQ ID NO: 115861 - DNA, 547 bp, Physcomitrella patens
  Intron number 1 from transcript Pp1s77_25V6.3 (locus Pp1s7 7_25V6) derived from phytozome v7.0 (chr-ID scaffold_77; p os 142196 to 142742)
gcgtcatcgtgctcctgactacaccaattaggtattcttccttctctgattccgagccacgctgtttcagttccgtcggaaatgttatgtacctcctccctcgagatttttctatgttctgttgtgcatgttgcgatggtttctcggctggtactggctctcgtactggttgagtgggtggtggtgtatttgtatcagttgagggagattcgccggacatgatttcttttcgatatgctgtgttgttacttgtcgagcgtctgtgctgttcaattctttttacaagaatcctggagtgtgcgtaacggcgttatgatgtgagggtttgaggtttaagagatcccaggtgaatgactcatccgagcaagctctttgagtgaaggcgttttctgtccgactattttgattcctcggtgacaatcacagtccctgtttgcttcggtcggtagtttattgatatcaaccgctgctccttcttaacccgtattctcacctacgacatctctctgcagattggactgtctggattccttgttagcattgaaaa

SEQ ID NO: 115862 - DNA, 703 bp, Physcomitrella patens
  Intron number 1 from transcript Pp1s87_91V6.1 (locus Pp1s8 7_91V6) derived from phytozome v7.0 (chr-ID scaffold_87; p os 689577 to 690279 reverse strand)
aaaaagtgaaaggtatgtgagggattctctttggatccctatcaccgtgcttttggcaacacatcatgttggtaatgctccccacagaaatgtatcatactttggttcggttgacaaaacatttcttttcagtgatgaattataatatttaatttgtggaattattccgatttttatttattcacttgacaatttgaaatgtcaaattttgatgtaacttctgttcaatgtttttgttcatattcttctttaatattaattttcgcaaacgtctatgccgttaagcatgggaactgtctctgagaattacacatggtttaatgcttttgacccttttaaccaaaaaaaaaaaaacaaaattcaaaataagagtgtccatttcaaaaaatgaaaaatgaaaaatcttcacaacgaacaagaatacttgaaccccaaatttgttttacgaataagtggtttaggaacaagtgacaacaacttggaacactatgttaactttgtcttttcttaaattcttaaattcagaacttaaaaacccatttcaacactttttgtttggatgtacatgatttcttgggactatggagattaaaataacgtgtggctgcaatacacatttcaaaggtaatcctcactgcgaatattcccagaatatacatgaaatcattgatagaagtggtagaattccccgagccaaagctcg

SEQ ID NO: 115863 - DNA, 1000 bp, Physcomitrella patens
  Intron number 1 from transcript Pp1s51_296V6.1 (locus Pp1s 51_296V6) derived from phytozome v7.0 (chr-ID scaffold_51; pos 1777517 to 1778516 reverse strand)
caacggtacgccttggctgtcgtttctcttttggagatgtttcggcttgttgtgccatcattgcaattactgtcgcgacagcttgtttgattaggtttggtttggttttctttgtttgttttaatgattttatgtagtgaggagtgagctgaaatgcttccaaagagattgcagagacaccttgcagctagagattgtggaacctgttaaatgagattcagaaggtctgcagccttgggcgatgtggcgcaaatttagagcgtgaatttgcataatgctgtggtgtatgggattgattgcacctgattattgagctgcaaaagagtagttggatttttttcacaggaacatgtacttgtcagaacaatttatgggtagatcccagtagtttgcagtcgttcttggcgcttggaatcgttggccgtcttgaattgctacaatttcatccgtccttaaagcaagcaataaaagtttgaaaagatttttcttctgggttgagctataaagatgctttaaatgaattggcaagctttagcataattgttacagttcacttggaggcgccttagagaacctagctgtaagacgcttgcaattcagtaataatctaatagatttagcgttcagctgagttagacgagagaggtttctcgctcataggcgccgtcctcgatgtgggtctcatgactcgccgcagcaagtttgtcctctcgtccacagtttgagcaattttgatacaattcgagggttggcaatgaaagaaccagtagttcgaccaatagaaaattttgatgagaggaccaacattcatgtaaggattggcaataagtttctacattaattttacatgaacaacatgaatgttatcttttaatatgcaccgtggaatatggatttctgtgacgcttacttttgcaccatgcatgcaacagtggccgaagcagctcaatgtcaatatcgtttaggtcgatcccgaaattactgacatcattgaacacga

SEQ ID NO: 115864 - DNA, 560 bp, Physcomitrella patens
  Intron number 3 from transcript Pp1s203_84V6.1 (locus Pp1s 203_84V6) derived from phytozome v7.0 (chr-ID scaffold_203 ; pos 745117 to 745676 reverse strand)
gtgacgacaatcaatcgttggggcaaacaaggtgggttgatatccctgtttgagaattccagtagtgggtttgaatatgtttattatgagctccgaaatttcgagcttgtagatactgaaaactaattggcttgtccattactagattcgctgtgcctcaccccagacaatgttctataatacccatataatttgggactcttcctatcgtccttaagatttgttctgtcaggggtcgcctctccacagattattcgtcatgtgtgtctgcatagaactcgcagaaaacttaacaattcgccagaaacttcgtatgtatatcacatgcgaggttctgtagttactcgagttgcaatctcatctcagatctttcttaaccaccttgtttctttcgtactcagtcctggtgctgaattatgtgaatcaaagcttccaatctgcatattaaataattttcttcatttctatcttccacttaagtatattggatgtttccgtccaagttgtgagcgatgccagctcattgttgacagttttttgcgaacacgttgtctgtaggg

SEQ ID NO: 115865 - DNA, 859 bp, Physcomitrella patens
  Intron number 1 from transcript Pp1s7_65V6.2 (locus Pp1s7_ 65V6) derived from phytozome v7.0 (chr-ID scaffold_7; pos 272871 to 273729 reverse strand)
cagcgttagcatccttccctatcaaatcgctgtcggtaagtatgcaagtttcagctggacactgttttggttgcatttgtttttatcagtgttgatacaggtaagtttcgtcgtgggcgtagtgaagcagctgggtattgtgttttctgcaccttctgatatggtgaggccttgactagtgatttaatgtgcccatgctctgactactattggacctcagagtgacccttcatggcagtgaatctgatacacttgcaaagaaattgcttgagagcttgtagggataaaacctctgattgaactactcgtgaaatttctcaatgacagccagtgagatgcactcctcttatgttccgagtacatgcacaacataaagttttgtagtcattactctccagttcccattcacactccgtcctggacaatagagtaacattatcgtccatcatcggtttaccggtgtttctggacaaaatgctggtcctgaagataccttaaatctttggagtgttgtccaacccactgttctcgaatgagacggctggatttatactggtagctagaatggtttagtttatgctgctgcatgggtaacatcggactaatgtatcctgatgtgcagcgtagaagtgccgatatctatcacgggtcttgtatccactgaattctaggaaggatccttaatctactttgatttttctagaaccagaaagtcatggcgcttcactaatttgtgcagtaggttgaaaatctggtgtgtccagttcagacatcgattcctgtcttccattttaaattcccactgatctggttattgaccggcagaagtactcttggtgtctggcctcgcttgcagaag

SEQ ID NO: 115866 - DNA, 756 bp, Physcomitrella patens
  Intron number 1 from transcript Pp1s17_17V6.1 (locus Pp1s1 7_17V6) derived from phytozome v7.0 (chr-ID scaffold_17; p os 74419 to 75174)
ctttggcccggagggtaccactagaattgaagcaggtacgtttttcttctaatcttctttcgttttggttgttcatatgcctgcattttctttgtagctccagcttggttttctagttggggtctgcagttaatggctgtttttctaggtgaaaatcctccgtgcttatctctgttttgattttcatttatgccataccctgggacacttgtttttgttttgttttgttattattactatttttcatttagtaaatttgaatgttctagtgtcaatttggtaattgttttaagttatcgaagttaacttggttgttttctaacttcctcgtagttgcgagcagtattgcattcattgttgaaaatagtttcatgtgtcgtttctagctgtttagaaaccgtcgcctgtcaatattttcctcaaatcttcgaccgcggagagttaatctagttgatgtttctacttcgtccctacttgctagaagcagtgtagaagtgtgtactgcaaataaggtggtgaaggatgtagtgtaactttcagcaggatgttggtgattgaaatcagacgctctgctaagccaatccatggtccatggattctcttcgagtttctttacatagatttcaaatgtttgaacatccattcaattcgtcgccattgacctaatggagtgtacaacatggctaactatttttattctgacggatgcttgtgtctgtaggcaaattgttaactgcgaagctagttgatcgacct

SEQ ID NO: 115867 - DNA, 546 bp, Physcomitrella patens
  Intron number 1 from transcript Pp1s213_10V6.1 (locus Pp1s 213_10V6) derived from phytozome v7.0 (chr-ID scaffold_213 ; pos 95724 to 96269 reverse strand)
ttgaggaacgacggagggccgcagtgcggcgacaggtacttcttccttggctcatccttttctttagaatcggatgtcgtaatttgaaacgctgtgcatttttatttttgaagctatttgaaagttacatagatttgctgacctcaaatttttgttcaccattccgacgttcgtcaatccttttttgaccataagttagctccatgtcggtgccgctcatagctataactcgtcagaatctgtagatgtacgtcctcgatgtttaccggggctctgaacagaacgctcggcctactgctttactgcaaaacaagatccaattgcgagagatttgtgtacatgatctcaagcatcgcacaaactaatgctgggcgaacagcactttcctatcagacaagatgaagttgctgacgaagtaataatcagtcacatggtccgttggttaatcgggggcattctagcagcaaaagacgctcatcacgacggtgacaaaacttcctgatatttcatatgacctctaattcaaagacagtgcggaactgctcg

SEQ ID NO: 115868 - DNA, 831 bp, Physcomitrella patens
  Intron number 1 from transcript Pp1s422_9V6.1 (locus Pp1s4 22_9V6) derived from phytozome v7.0 (chr-ID scaffold_422; pos 122852 to 123682)
tgtcgtcttcctgctccgcccgttccactcttttcgtacgtcaactcttcgtttcctcctctgctcagacttcgtcgtgcggagcagctttggcaagcttgtggttttgaattttgagttgggttgcaagttttgaaggaagaggacatactgaggtttccgttgcgctagaacttggttactcgtaggtccatttcactggtttcgctgtggttatttgggttcttgagtactattgatgatcctgccttcaaggcccaattttctttctgtgggttggattttttggtttcttcttttcatgtaagtgtatgtccatttaagacacccaccttactactgcaacactcatcgcacattcgccatgtttattttatcttgttatgccatgtgattttccttctgcatttctggacaagtctgttttctttgtgttgacgatttggggaatgcatttcacattgagagatgcctgctgttgtttatggttggcttagttggagtgatccggagtggggcgagtgatctaccgagggagtgccagagcgagagagagagagagagagagagagagagagagaaggcgggctaggaaacaatctgtgaacttaataagctagggtttgggctacttctagcagctcaattgctgcttttttgggacattttatgtgcttttctgagcccttaggcatgatttagtgtaatttgttatagtttagggtggccaattaatcgatcgtcacacatacttcgtattgaaaatgaaatggtctcgcattgatctctctgttgttgctttggttggcataatagtagcgaaagagtgat

SEQ ID NO: 115869 - DNA, 591 bp, Physcomitrella patens
  Intron number 1 from transcript Pp1s175_28V6.1 (locus Pp1s 175_28V6) derived from phytozome v7.0 (chr-ID scaffold_175 ; pos 155394 to 155984 reverse strand)
gaggacagtgtgcaagcaaagattcgcgagatcaagtacattattcagaatccatcttttatcatttcgttttttatctgccgtttaagtttcctattcgggtttcattggcggtggttttgtccaccgtccctggtcaatagcagtgttggtgcttgacgaattcgtcgaccggagtcctgtgaaatgcatcacatcgaccaaaaaatgaggggttttgcggttgattcgttaccagttcattggccagcgttaccaggtcgacaactgattagcaaattagtaagcgcggtttgcgtcgtattagccagcacggaacactcaaacttcagagcaattttctatatgctgcaggggatattgagcctctgtgaatcaactaaatttttaaaaataaaaaaaatggtaccaacagcgtgcctattatgtcttcgatggcatgcctaagcagcccacctgcactatacatcttcttcacctcatgcaatttttctccgaatttgcagacgatattcctctcgtaatctaagttggagcgggatccccaaattgagaccattacagtggcatcgagtctgaagatcctacatc

SEQ ID NO: 115870 - DNA, 552 bp, Physcomitrella patens
  Intron number 3 from transcript Pp1s64_220V6.1 (locus Pp1s 64_220V6) derived from phytozome v7.0 (chr-ID scaffold_64; pos 1796515 to 1797066 reverse strand)
acctcaggaggcgttggtaagtaaatcatttgttctctactctgcagttgaactatgtggaaatttgaatgtatctttattagtattagacagaaagctttgtggacggtgaacaagttggttcaccttagttctggttgattagtaataatcaaccaggatattggttacctcacacaccgttgagaaggtgaaaagggaaatgaaagatgatgtcaggcccactttcttggccaatcatcagttaaggcctggtcgttgtgttatcagtcttcacaaccacaggatatctgtgaacttgggtcatgttttatacagatggtctaaagatgggcagatcttcggaatcaatgatagattttcgcgtgcacagggttcaagccccagacattgggtgatattttgcaataatgaacagcgtgttaatcaacgtagattgtaaaggatgcgcattcttgttaccccgtcctaatcaaacgtgcctacagaaacttattttgctttatgttatgagcaggggcttacagtgactcgagggggcttcctggggta

SEQ ID NO: 115871 - DNA, 929 bp, Physcomitrella patens
  Intron number 1 from transcript Pp1s36_3V6.1 (locus Pp1s36 _3V6) derived from phytozome v7.0 (chr-ID scaffold_36; pos 37256 to 38184 reverse strand)
tgactggtttatctcttgtagttcgtcccgttcaggtaatccttttcagctccataatctgtgccatttaattctggttttgataatctggggtgcttgtggagaggatggactttgggcgtgaattggcaattgcgctggattggggctcaagagcgcagaaatttgaacagaatttttgggtgtagtaattccgagtccgctatggctgcagtcattcggttaaagttagtgcaccggaccacgtcttcgtatagctgtatctatggaacgcctcgattgagggattcaaaatgctcctgtttcacgaatctatttgaggttcattggattacaaattggtggtacttatgaggtatataaacccaagattattgaggagactgtccgtgcgatgcggaaatttatcttaacttgagaaggtttctcaacattgtgaagtcaacttcgtgggtgtctgcagagcctgcaggagttgcactaatctccagttacttaactatttgcaataacgggaaactcgggcgtatgaaccttgaggatatttgtctatggctaaacatgtaaccttcacttgagagactaagatctgtcatttttctttcggctgtcattagtttttgtgtctacatttagcatgtatatcccaatcgtaaaatcgtgatcctattcatcgtgctcacgctgtaaaatatctaaatatagatttatgtaaaggaaccctcttttaattttttcaaagtagccgaagcaatttgtccccacattcccatgtccagtcgctgatgggctaagcgcagcaacacttttggttttatttataaccaactttatgttaggttgacgcatgtatcagacactcgttaatttaggtcctatcagttgttcaccgctttttttgctcgtttgggttttgaacaaacaggctc

SEQ ID NO: 115872 - DNA, 566 bp, Physcomitrella patens
  Intron number 1 from transcript Pp1s100_55V6.1 (locus Pp1s 100_55V6) derived from phytozome v7.0 (chr-ID scaffold_100 ; pos 283821 to 284386)
tgccgcttgtagatacttcagcaattgctggtgattgaatcagctttgtcgaaacgcggatctgattagggtttgcgggtttgtgcgggggaggtagtcgcacaacgcaatcgaaggttttagggttttgttttttagctttcctttgggtcgacactctttgagatgattggattgtgttgtacctgaagattagctgcgagtttgattattgttttttctctttccttttgtttgatatgtaatttccgttgcggataggttggtgcactttgaaattgaatttcgctttgttttgacgtactttgttttggaagttatcatcttatcttgaggctaccaatttttcaccatcttattgggcgcaagggtagaatctcgcagcttcgggaaatcttagcttgtgttgtttgaattgctggaaacgttatcaataattgttcagaatctatttcaaggaaaaacctaacattcctattgagtgagtcaactgaacattttttctcaaattttgtcattgcggattttcattaaattgccgtccctttcttttgtacaggtttgta

SEQ ID NO: 115873 - DNA, 884 bp, Physcomitrella patens
  Intron number 1 from transcript Pp1s128_94V6.1 (locus Pp1s 128_94V6) derived from phytozome v7.0 (chr-ID scaffold_128 ; pos 632657 to 633540 reverse strand)
agggtccattactatctgttacaagttgctccgaggtaggattcctcgcactcagactttttgacgactccgaaggcgctgattttgctcaacaattttctggggttgcgtttatgacttgattcgtgtagtcgtggttttatattgcgttgataaacgtttgtggaataatttggttctctgggactctttgttcataagtggtacactggttgtctcacaggcttgtcctctaatattcgctgtgacaacaccagtcgtttgacttggttcatatactttatgggattgaattcgtgactcactaaatgttgtaataaagtatgagagaggatgcgctgccacaaagctcttgggtattgatatggattacgtcgtagtgctcagaatctatcagttgacgcgcaattgaactggtttaataggtattgttattgttcgactccggctaagttttcattagcaggattcgcactgcgtttcaacgtcgacaagaaaaacctagacgtttgcgttaaaactagatgacggcatcgctgttctgactcatgaaagcccccgcctcaccatcggcgccgttacttcagcaaccagtgatcttagcattcgtggttactcgcacaaatgtattcttaaatgaggcgctttgacctagagcctgtgaacattcggtactttgggctaaagtggctgactgattggtgaggggtttgcggtgtctcactccatgtccagcatccgagggacttcatgtaatgagaaagctgtgaaacaacaaagcgagatattttgccgtttcagactttccagagcgggcagtgatataacttctaaatcttagttttgcagcaacaagcacaacatacaattttcatcattggtat

SEQ ID NO: 115874 - DNA, 590 bp, Physcomitrella patens
  Intron number 1 from transcript Pp1s360_49V6.1 (locus Pp1s 360_49V6) derived from phytozome v7.0 (chr-ID scaffold_360 ; pos 386899 to 387488 reverse strand)
actctcagtcccggcgtgagtcccagttcggcacaagtttctaaattctgaattgaaatttcttgaattccttcgaacttcttgaattctttctctccatagaccaagtttgtatttactctttgttttttttgttttttgatgctagacaaattctattttaaataattataacactgacgtgaaaaagtattggagtgaaatgcacccagttgcatgtgtagtgaagatccccgaatgtgaaagtattgtgttcaaactcacaaccgtaaccaagtaacgtattgaaggcaaggcgaagttgtgatgtgaggcaaggttgaggcgaggtgagccagactccaagcttgtaaacctgattgcattggaggtgaacctgtgctggatcaaaatttggctgccctgtgttgatctatttttctttcgaagtgaagttgaggcattcttggggcgatttgaatcgatattttattttattttatttattttgttttgttttgttttgttttgtttgttttctgaagtgagtaattgtgctccttcgttgtgtttgaggttgaagtaggagcttcaaggagagggacgttaca

SEQ ID NO: 115875 - DNA, 380 bp, Physcomitrella patens
  Intron number 4 from transcript Pp1s18_206V6.1 (locus Pp1s 18_206V6) derived from phytozome v7.0 (chr-ID scaffold_18; pos 1558020 to 1558399)
cttttttgggtgaatatcacaaccatgttatctgctgtatccttcatttcgtgcgaagaaggaagactttcatattagtttatatatttgtttttaacaaggtgatccttagtttgtattttttgatatgccccgagtgagttcagaagctgcgcatagtcacatgatttacactaatttccatgtgcatatatctatcacgacaatgctccttgaatcttcaaatggcaaaaattttgcagcatttttgttctgtttgaatataatccatgttctcaaagattaattttcctctctcatggatatatgcccatgtaatatattcatggattctttttcttacaggccttgcaacgtcaatcactgttactgcgctattc

SEQ ID NO: 115876 - DNA, 925 bp, Physcomitrella patens
  Intron number 2 from transcript Pp1s138_144V6.1 (locus Pp1 s138_144V6) derived from phytozome v7.0 (chr-ID scaffold_1 38; pos 852710 to 853634)
aagactcaactgcgttgcacctaggtgagtatctgtcagtaatctgctcaaatctcaagcagcgtgcattggtactaggttgaatgatagccaactgcttagaatattatggagctcatttagatgtgcgttaataagttgtgagcggtcaagttgagagcaggcctcaacctcaggaagagatgacgacacatctcttttagaagattatcgaatttttgactgttttgcagaacttaatccgattcattgagtttattatgaccctcgcagttcaatgaaattaatgtcatagcctacagtttctcggctgctgctgctgtagccatgttagccgcacgtaaacataacatctagtgtgccaagcttgttcatcaaaatagtatgtattagcaacttattgtcagcttagaaccagccgcgaggaacggtgaagagatgatatttttccgttgtttgcgtcttcgagatttgctgaggtcgtcagttgttaatactgagtgaggaatatgccttgaattacagacaaatcaaacagaagtcaacctgaacttttcatgctctcagattgaaccgatccatattcttgtagtctattacgtctgaagtcaattctctgtcctccgagtgcaactttattttcctcttcagaagctgctgtgcacacgtttacagaagttgtgatgctagaaaaaaaatgttgtgatgctcgaactgcttataaggaagaatttagtcgatgttcgctttcgatggtgcatcatctagtattatttgtaagacctccataatgcttgaatcgaatgttggatacttcaaggatcacggaacagaagtggagaacaccgctgtgctagtcggtttgattttataattgtcctcctgcgcagattgtaccacgacctttcgacgtcagtttagaagc

SEQ ID NO: 115877 - DNA, 214 bp, Physcomitrella patens
  Intron number 1 from transcript Pp1s9_319V6.1 (locus Pp1s9 _319V6) derived from phytozome v7.0 (chr-ID scaffold_9; po s 2176363 to 2176576 reverse strand)
cgccgtagtgaattttatatggatttttaattttgattttttgaatttgtggattttgttttgtgggtttttatttttacttattttttatttgataatctttgtatcttcttttttgtgtaggaaaaatgcgtattcggtgcgttagtctgaagttcagggtgccttattattaataggttttttgggaattgtttgtggggcaggcgaaagc

SEQ ID NO: 115878 - DNA, 997 bp, Physcomitrella patens
  Intron number 1 from transcript Pp1s387_53V6.1 (locus Pp1s 387_53V6) derived from phytozome v7.0 (chr-ID scaffold_387 ; pos 312512 to 313508)
tgcagcgagtggacgcacctgtgactgtgagtgtttccggtagatcggacttagtccgtggtctctgtgcggtggtttttctttgaaatgaagtggtattcttgtgccgacgttctgttttttgtttcttaaaatttttcgccatattttcatgaaacttaactgctgatcgaccaacttaattttacgtgaaagcgatgtctacagtttcgagaacgattatgttttattttaattaatttattttgccccgatgggtccgtgttgcctattgctactttcccttcttatggctgcttcttttcaactttgaatatagattttgtcgtggattgactcagtaagtagctagaccttaaatatggttttttttttttgttgcaaacctggaattttgatggaacatttaatatgtgtgcctctaagttggtctgtttgtgttgcaaagtacgtattgtggcttttctttgaattgccgcttatgtgattatctcgtgcgtttttccatgacatcggacgtaaggatcatgtccggatttgtgattaggtttttgcagagctgggatgcagttgactgtacttgatgtttctcacgtatttttgtcaatgtatatcattatgctgtgaatggtgtggtcttttgtccttcagtttcgtctgaaccgtgtttttgttctgtttgcgaagttctatgcgtcaaccgtgaatctagtccacctacattgctatttcggtgggcaaattcatttgctactggaatttatttatctgagatattctcctgtttcggtttcattcgaaattgcaataagtttttgccgtatcagtgttacggagtcggtgtttacaacttgaatacattttagaggtgatgataagagcgcttgtaactgctttgcttgatcttgaaatctgttttaatatcaatcgacgtctcatcagttaatttggatgttttctgtatcgcagatttgtggtgacatacacggccagtttt

SEQ ID NO: 115879 - DNA, 280 bp, Physcomitrella patens
  Intron number 2 from transcript Pp1s2_239V6.1 (locus Pp1s2 _239V6) derived from phytozome v7.0 (chr-ID scaffold_2; po s 1198039 to 1198318 reverse strand)
acaccatcaactaccagcaagacaatcttgtaagcattcttttttattaattattttaacaaaattctgtctagaaatttcttggttttgttttttgaactaggaatgtgttaaaagtatatttcaccacttttttcttcaccctcacataaattgttttttattgttgttgttgttgggcagttattgggattaagtgtgttattaaattcattgttattgtgtaccatgcggagttttcccgttaatcttcttttgtggtttgtggggatttcaggat

SEQ ID NO: 115880 - DNA, 721 bp, Physcomitrella patens
  Intron number 1 from transcript Pp1s347_22V6.2 (locus Pp1s 347_22V6) derived from phytozome v7.0 (chr-ID scaffold_347 ; pos 269582 to 270302 reverse strand)
cgggacttggtgacttcgagacaattttgaaggtgggtacccgcgccatatatgcccctggcgccgtagtcttcgaactcgagtttctgctcttgggattagcgatgggattcttttggaataagcgtgcgcaatccgattgaataagagtgatttacctattttgcttcaccaaattggctttttcttgcatgcttgttgtgggcttgtgtgtgagactggaattagtattgtgacgatcttgtagcgtgggactgtcacgagtacatgcttcttgcaggtgtatgtgaaacttgtaacctcgatttttatgtccttttgatcttcgtttctttttgaaaatttggttttaaaatgttttcgagtcgttcgtcgattagttccttccctcgggcttaattgtgtgactttcttcagataatactttggagtatgagtatacttcgaattggtatccgacatgtagacagaccgttgtgtcgtcaaatccgttgggttgatgaaaacgatgagaagaaacgatttcaataacccatgatttgtgaccctaatgccgtacgcacattccatctccgttttgctactaaagaaatattggattcgtcctccagatacggcattgactcccttcaatttaatcagccccagttgctaacttctgatgttgaattggcgttggtttccagacagctgaattgcagggaccaggtgtgctgctgct

SEQ ID NO: 115881 - DNA, 918 bp, Physcomitrella patens
  Intron number 3 from transcript Pp1s178_61V6.1 (locus Pp1s 178_61V6) derived from phytozome v7.0 (chr-ID scaffold_178 ; pos 514887 to 515804 reverse strand)
tgtactgaagcgttgtccgtcagtctccaccatcggtactagcctttcatccagctttttcaatagcgtaataccttccaccatttcacttccacaaataatgcatgaaaccacagtcgcagtcgccgtctgcaaagaatcatatcacaagagatcaagtgttgcagttgtaccgcagcaagatgtgtcgtaaacatgtgaagaatgtgtacccctagtgtatgaacgtagaaaatgatctggttgaagctagtgaaaagtttacttgtactagggataccatgggagatagctttcatcaaatgatgctacgtcacacatcaaaatcctcgaatgaatgcagacatcccctgatagtatttacattgatgtattttgatttggtctcagatgctcataactctcaattacatggcaatctcgctgttgtgtcatgtcaatgtctggctgagtattagttctcgcccccgtagatgttaaaagaacagacgagctcatgattcccttattgcccccctcaaaaccaaatgaaatgtaaaaacatacacacacaaatacatacattacatctaaaaatatttgcaaggtaacaccataatcaacaccacttgctcagattcgattacaattgtgaaagcaaagtcgaagttgagcaagtgggtgcaacattcaggtgctcaattccatcagctgcaattagtcatcaaggtcacagccgcatgaacctgtgtttacaattcctatcttgaaataatagtagcgttcatattgtagtagagtttcagtggcatgtagtgcttcatttgatggttgctaggactccttcaactcaatgtttcggcaatacaatcaggtctagttgtcgaatgtgagtgaaactcttcaacaatgctattttgtttttagagtacacacgca

SEQ ID NO: 115882 - DNA, 1009 bp, Physcomitrella patens
  Intron number 1 from transcript Pp1s447_16V6.2 (locus Pp1s 447_16V6) derived from phytozome v7.0 (chr-ID scaffold_447 ; pos 57947 to 58955 reverse strand)
cgggtgctcgtgggtcaattcccgtcttgataccggtgagtctcggccctgatcctcaatcccctggcactcccaattgtgcattgtgtcgcagttgtattgtcacgtggaagactttgttgttgtcgggtcgaggtgtgtcgacgtgggggtgtggctgtgtctcgatcgcgttaaaatttgcgattgtttgacgctgagtgagtgtgtttgagtaatttgctcactgggctctgttcgttgttcttttggagttacgatatgtcgcagtctaaggtggagaggatgagtgtctggtgctgactacgtgggcgatttactttataaaatttctaacaagtatgtgctcacagtagttttagctcaaaatagtttaagcatgtctgatttgcagctcatagcggacttggcgcattcaactttcaagtcgataccacagaatcggccaaactactgaattccgcttttgcaggcggttccagtccatttttctcaaatactttaaggtgcttttaggcatttgattgtgctatggaatctcatctactttacgaagaattgctcggtgtctacaatggttgactagtgtacacccggtatggtgatcgctggtcgtcggacaattccttaagcacacaatttgggtgtttacagttgtcttggttgtgatggaaacttgatctgttattgttcagtttactggttgctaccagtggcttacaatgtgaaaatcttgagtgacatctcatggattattctggctagattagagttgtattctttgtatcattgattgtccaggacaggaaagggaattgagagagtcaacgtgtccatttattaacttcttttcctggtcaagattgcttgtattcatgaatgatcgtcaggttgctgttaatctaaaaatgatcttcgtttcattatattttgagtgttcatctgattccagaacttggttttgggagagtcttaaatgacagaagtagaaactctatggtcaaacagg

SEQ ID NO: 115883 - DNA, 891 bp, Physcomitrella patens
  Intron number 1 from transcript Pp1s163_90V6.1 (locus Pp1s 163_90V6) derived from phytozome v7.0 (chr-ID scaffold_163 ; pos 680998 to 681888)
ggccaagtatcaatacccacactttaccctcgtcttcaacttcacgcattgtttttcacgtggatttttcaattcctctgtttcacagtcattggttttgtggtttgccctgttagtcggtttcggacatgcacggtgagttcttttggttttcgcggtcctcgaggtgaggtttctgcctgatttcggtctttcgaatccttcactaggaatgaatggtttgagggtcatgctcccgcttcctcgagaagaatcggtgtcgatgttaccatcgacagtttgagatggattatggtgtatagctcttgttttcgtgtcagtggatgtggagcttttagggtttctggagccgcgttcactgagaggtattatagcttggaatagcgccacacaccaaaacttctgatgttgttgcatgtcattgagagtttggttttttgagtccaagaaactgtttcctgaaatcgcctgttaatgtcacaaactctgtgggtttgtagtttatgtttgagagatgtttgagtaagagaagaaatgaatctcgttttggatttttaatacatactggagtcatgtttgagtgtctttttgactgcagtatactgagttgtaatatttttggtcatggggtggctggcaaagacgtgttgatcttggactctaagtttcctgctttggcggaactctaagagttttctgttcatgttgaatgctagaccggtgtttgaggtgatgatttatggtgtatgcacattcttatccatttgcctatgaaggtggactgcttggctttcctgctgctgttgttttaatggggcttctaccttcattcaacaagttgtttatgctgtaacagggaagtattgaacagagcacaggtatcaatccagg

SEQ ID NO: 115884 - DNA, 762 bp, Physcomitrella patens
  Intron number 1 from transcript Pp1s241_58V6.1 (locus Pp1s 241_58V6) derived from phytozome v7.0 (chr-ID scaffold_241 ; pos 254086 to 254847)
cgattgctcctccgctaagcgaggcggcgatttgggtatgtttctttctcccactccgctctgcacctgttcggatttctccttaccctttcccgcctttctttttttgtagtcgaaatcctcgattgtggagaggactctgggcaaatggctttcatgttcaactctttgatttgggtttgatatcagctattgcggtggtaaattatgtaccgtaatctttcttccagttcgggtttatgtgttgggtagggtttgctatcgttgatattaaggcctgacttatcaatgtgatatgtgtcaccgacaacacgttttggactggtgtactcggccatcgaatgttagggcttgtagggcacacaggtcttcagtgcggttcttctttcgtctctccttctatttattgtcaggcttgttaatctttgaagatatcacgtctctctaattgctggagtgtattttgtttagggacttggttcagtgtcccacctggttcttgctatggcttcgttccaagcttctgtgatcttcacagtatttttcacaattatcgttttgcgtctcaccgaaattgtactgattttttcgtattgctttatccctgtcagagagaggtcaaatagtttttctggacagtttctctcaacgcgagtgagggataattgagtcattcatgtgaatcctagtacgctctgggttcatagtttaacttccttgttcatcgtgtgtgtatgaccaggctggttcggccgtggtcag

SEQ ID NO: 115885 - DNA, 403 bp, Physcomitrella patens
  Intron number 4 from transcript Pp1s147_88V6.1 (locus Pp1s 147_88V6) derived from phytozome v7.0 (chr-ID scaffold_147 ; pos 579467 to 579869 reverse strand)
ctcgataatcatagaaaggttctgcattccctccaatatttcccatcttccactgctagtgatgcttcttgtaatgtgtttcgacgttgttcaagcgatcaaacatgagctgcctgaactgcagtttagatgttcggttttgcaggtatctgccattcctttttccagcttctatccattgagaaaaaaacaccaagtatctcagtttttcatgaattttaaacaaataggctagtaggggtttttaaaaaattatgatcattattattattatttttaaatggtcattttgagataagttctcaattatcttttgagcttacctgtcaagaggcgtccattcgtaatgcccggggttgaattgggtgcaccgattgtgcagttttccttcgagattcaagac

SEQ ID NO: 115886 - DNA, 538 bp, Physcomitrella patens
  Intron number 2 from transcript Pp1s6_324V6.1 (locus Pp1s6 _324V6) derived from phytozome v7.0 (chr-ID scaffold_6; po s 2693836 to 2694373)
ccagggtggagctaccaagtaagtggagtgggaagaggggagcatgcacttggatggagagtttcgttacctggctagctggttgcggtgtcggttcgggctatgttgaggtcgattgtctggttatgggtgtgacatgtgtagtcggctgtgcatatctacagttgttaatgtgtgtagcctgtttgaacggagtgatgtgttgtgcattagtttggtttcttttctatcgatttgtgtcggcatgtggggataatgtttgtggtcgtggcatttgaggagtgagggatgtaggtttacatgtagtggttgcagatgtggagtttggttattgatcttaggatatgttttggtagatggaggaggatgatggttgatgtttggattcagcgtggtcggtgctgcatctgatcgagttctggttgtagttgttttagtaacttgatttctgtgtttggtttgattgagttcttaatcttacggcgtggtcttctttgatgcagggacctgtcgggccggcagacggtcaccagcaggg

SEQ ID NO: 115887 - DNA, 849 bp, Physcomitrella patens
  Intron number 2 from transcript Pp1s237_84V6.1 (locus Pp1s 237_84V6) derived from phytozome v7.0 (chr-ID scaffold_237 ; pos 626513 to 627361 reverse strand)
gtggcgaggacattcaggacattccattggaacaggttcattctgtcaaccgatatcgtatttttttttatttttttttattttttatttttatcaggcccttggttgcatcaatgttaagggaatgggaagaaatgttggtagaaccagccaagattccatgctttcgatacttaaccaacagcttaacggtttgcctcggctattgccacaaaattctgaatacagaaaaaataaaatatttgattacggtttcaacccgcacgattgaaatttgaacctctaatttgggcatttggttcgaccgatttgtacactagctatcgattcttctcgtttattagttttgattcctattgataggggttgcgcgaaagattgctgctattctactgtatagctccactgttcttaatgagcacttacaaatcctcagaatttttcatctctgttatagccattcacgattagcccatagcaaaatgttggtctcttcggcttttcatgacagtgtcacagttccaagggcatcatggttcgtcttatatgggtgttagctatgcttcccgcgtcacctgcggatattttacttcgacggagtcacaaacttcgtttctggtgaatggccctgtgctgtgttcaattgaatgatgaggagttccatgattgttctgctagcatgtctcagatgttacgagagtagattatctgagatgtccgaacaggagtcacaaacttctcgagaaaagaatttaagattttctttatggtcactatctaacaaagactgaacgctctagagagctaacttgtggaaagttacatttgcagtgtatcgacgagcattgc

SEQ ID NO: 115888 - DNA, 820 bp, Physcomitrella patens
  Intron number 1 from transcript Pp1s94_105V6.1 (locus Pp1s 94_105V6) derived from phytozome v7.0 (chr-ID scaffold_94; pos 815367 to 816186)
cctgcagtctacatttgtgggctcgtgtttgctgagtaagtgtgtgtgtgtggttttgctgtctatcttgtggtggatgaatggagttggggttatgtttatgtgcagcctggaggctcttctaggaattgcagaattgtttctttgattggcaggatgtgggaatttctgtgaatttgacgcatttctttcactacttcgatttcttcttcttcgtcttcgtcgtcctttttttccttattcttgaatttttccattttggttttttttttctttttgtgaaactctgtttttatagataaaaatctgcgctatgaactgtaagtttatgaagggccgtctttaaatctcgaacaatggtgacaaagggatgttttgtacgtgtgtttggaattcgtttaaatttgcgtttctgctttggaacgtcattgcgggactctgcaaattctttctatcggttgatctgcagcatgtccttattcctgactaatctaatagttgaaattttatgggtgttttgtgagaaggatggatgtttctctctataattcgggattttaagcttatcgtgattaatgaggatttagtgccttgacagtttgaggaccttattacactatttggttataagtcaaatgtaatgcaaaattgcgcatagctctttatctagacacacgcattgctattctcagttttaacatactaacacatccatttcgaataggtgcaattgtgcagtctttttacgcctctacctctaccaattgcatttttaatgtgaatgaaatccccacaaccacttatttcttgcaggtggagg

SEQ ID NO: 115889 - DNA, 719 bp, Physcomitrella patens
  Intron number 2 from transcript Pp1s12_226V6.1 (locus Pp1s 12_226V6) derived from phytozome v7.0 (chr-ID scaffold_12; pos 1310040 to 1310758 reverse strand)
tgtttcagaatgtaagatttctctgcttctatctgattctctctctctctctctctcttttctgggttagcagactgatcgattctctagcattttggtggtgttgtggcaccatatcttgagttttgctttgatgatgaagagtgctaccatcagtcactaaatgttccaggacttgtcacatcaaatgcagaaactagggttaaattccattgcaagtatttataagtgtctatcagttaacttatgtttttgtcattagtttttttcattaaacttttttgagactagtcagaagaagagtggataagcatgatttcttctcacatgagaaacatgagttttggtaacaggcaaacctccccatcaaaccaacaagcgtgttgatcagattactcagcaatgatgaatgtctattctgattcgattgtgcaagaggtgtgtcacatgaagaagctacagcagcttataccgtgatttaaattgtgattttttaaaattaagttggttatgggttgttggtttttacaccttgcattaagaatgagaatgtgcatcaaataaatgatatcaatacaaacattagagaaattggtgtgaaaaaggaataaaggaataagtgaataaaaacatttgtttaacactagcatcttggtggattattaacgaactgtgggttgaatttggttttgcagctgtatttcgggtgcttaataaca

SEQ ID NO: 115890 - DNA, 701 bp, Physcomitrella patens
  Intron number 1 from transcript Pp1s207_106V6.2 (locus Pp1 s207_106V6) derived from phytozome v7.0 (chr-ID scaffold_2 07; pos 695107 to 695807)
ttccccattgatcgcctcgcctcgccacgcctcaggtacccatctcacctctctccctcttccctcactccctctcgtctctgctatccacttccctccttttctctcctcttcgcttcctctgctgccgactctctcttgggttctttgatctcttccttctgttttattgttttccccccttaggttgtgaccactcttcccttgcgttgatcgcctcgcggatcatactgcgtgccgcgtattgggtctccgacttcccgcgcatcttcttatttaatctcgcttttgggttttgttccggagaggtttagatctccagctcgcggttccgtgcctgcttctttttcgcggaggtagatcgcgttgggcggtggtgagatcttgctctgtgttgggttcaggttttgttttgttttgttttttgttttttttttgtgtttctagagtgggatgcgtgttgctggatgctttgttctgtgagcgccgactggtgcttttggctagtgtctgaaagacatttacttgctcgtgtcgttgccggagtggtaaatgtcgttgaatatatgtttcgttcggtttcatgggatgtggtcttagcaaccagtcgtcaatcccgattgtgattgtgtggtgatgtggatgaggtgttggtttttcttccagtgaaggtagggagatattaacagcggtgaaaatat

SEQ ID NO: 115891 - DNA, 924 bp, Physcomitrella patens
  Intron number 1 from transcript Pp1s171_111V6.3 (locus Pp1 s171_111V6) derived from phytozome v7.0 (chr-ID scaffold_1 71; pos 651107 to 652030)
attagcttgtgtatgattatttcctgcaaccattgtacatgctagtagcgttttcttttctaagagaggcattagtcgtaccgattacggaggactggaaacggctttgaaaagttggtgtgaagctcctcgttgatagagagtaggaaaatgcttgtgatcacttgggagagtgaaaataactgtctgacaatgtgatcgcttaatttgaagtacatacagcgaggtttgatgcgtggaagtttattgaaatttgcgtttcaggggttagggtcttgatgtaacagatctgtaatcatgtaaaattaatctagtattcttcacgtttcgttgttacgtatgtcaatttaactgtcttggtttagggatgttcagagtgagccactgtggtcattttttgatgatctttttgaagatcgggatgatactagagacggtttgtgatggaagctcgaggatggaatacttcagccattgatgcttgcctgtgctcgtctttacgaaatactatagtttttattctgtgatattgtaagaagtgaatcagcagagatgtttcctccgagtcgtaagttagccatctatgttaccaattttcaaccgagttttgtttgtttggacttagtcgaagaattatattttttgaataccttaattgatcagctttacttctctactaaaccttgggagttaaacatgtgcgcttgacttgcaatattcgccagaagtcgtgagaatcttaagtaacccctgtaaattgatttgtgaagtatgtttcagttttgctccttttttattttggacatctctgtcatcgttcccgactcaaagttaatgtataagactataatatttgtattttaggtcagctttttgccgaagattgctaagtacgttactgatatgtatattgcaggagaaagt

SEQ ID NO: 115892 - DNA, 887 bp, Physcomitrella patens
  Intron number 1 from transcript Pp1s407_4V6.1 (locus Pp1s4 07_4V6) derived from phytozome v7.0 (chr-ID scaffold_407; pos 53182 to 54068 reverse strand)
ggtaaggtgacttgtaattggaagctgggaatttgtaatttgtagggtcggaggagaattttgcttttggttcacaacaattggatgtctgaacatatatcacattaagggaattttgtaaaccgtcctgtagggttctggaaattgatgtagattgaggtggtcatcgttcaatccatgaattattcgaaagaagatgtacagaagttgacgtcgcttgtgtggatcatgtggaattatagtttccaatatgagcgtgctcttcttgtagggaacctattttttgatgtgtttcatttcacgtgcatttctgcattcgaaacgagttgacaaaacaatgcaatggagcattaacgtggatgtttttcaccgcatttacttagaagattacctagattaagttcatgggagtgccaaattgaggctagtctttgtgctgcgggtaatattgtgtgatcacaaatagaatatcctgtatctcatcgatctgagttgaggttaaaattttaactttctaatcaaagttgagtaatccagatactcataacgaaccagtgtgttgttttattgtagaaatttgttggtcgaagctttctataatacgctacggttgtaatcagatttcgaataaccaattctgaacttcttgagtgttgttggtagtaaaatttaattggatatgctttctcaatgtctgctgatgatgtggcaatatgaaagcaacaatacatggggttgcaagtccctctgtaggcgaggcacgccctgcagcaggtggctggtattgtagtaattcgttatagatggtattgcattgatttaaaaaatgaattgatttgatgatcattgcagatcacttgaattttttcttcatattcagctatttt

SEQ ID NO: 115893 - DNA, 1006 bp, Physcomitrella patens
  Intron number 1 from transcript Pp1s7_271V6.1 (locus Pp1s7 _271V6) derived from phytozome v7.0 (chr-ID scaffold_7; po s 1581146 to 1582151)
gccggtgagatatctctttttctttcgaatcggtttggaaattttttagctggtatgtgagcgcatggaggaaggggttcatgagccgtgttgtagagagctttgtttggggattttttttaatagattattttatagaattttttttctctcttctctttaaatgctctgtgtctcccatcatcgtcttcaaggctaatgcatgcaggatgagccgagccttagaagcctttaggcttaaaaaaaggttgatgttagtcttaagttttttattttatttttataatttttatttttatcgtagtagaaatttaggccattttcaattgtagtctctagtctagtttttaaagaagcagttctatggagattgagaggttttgattacatgaggacgttctggtatttaaacgaagtttaggcgataatgtgaatactgaatcagtgttttaattgtggtttaatttcgagtttgaggctagcatggcaagaatgaatgatgagaaattggtcgcagtcagttgccgtcaaatgtgaaggttctggagataggtgtgaacaatgcctggcttcttcttcttcctctcccagcattggtttttgtgtgccactttgtagtgattactgaagtacagaccccgttcgaaagatatttctcttctctttcattcagagactgatatctcaagaaggatgatatgtagcagatttttcttagaatccaggagcgtgttagcgatgatggttggccagattgtgcactttcagattttttctatttgttcgaggaaagcagcttacagagaaaagattgaattgagattgttcggcagaaacttcattcaacggaatgaaaccgatgcgagtattgttatttgaacgctgatgagcttcgctattctggatttgatgggcaacgacgagtagtgccatactgtgcaaaccaatttgcagtcgacactccaattaactatcatgcatgtggcagtactacttaaccgggttg

SEQ ID NO: 115894 - DNA, 434 bp, Physcomitrella patens
  Intron number 1 from transcript Pp1s5_344V6.1 (locus Pp1s5 _344V6) derived from phytozome v7.0 (chr-ID scaffold_5; po s 2544618 to 2545051 reverse strand)
acacactggaagcgtttcctgtaagtgcagtagacttgtggtgtttaacgcgctgtttgattcttagtccgatctcactcttcgaaatgaggagcggctctaagatgtaaatcactagctctggtcaactattttttttccaaccgatttgctgttggttgtgacaacactaggccatcattgccatcttccattcactttccagaagaattatcaatctcttctttctacagttgctttggtcgaggtggcctttgaaagttcacgttcagtgttttttcttgcactcgtttcatttttgttccatatccattaatagcgtgaatgaattgatgcggggtgatttttgaatatcaccgttgtagtgatttatagaggatcaatgcttgtaatgtgcaggtgtgcgacgctgaattttctgagaccatcccctg

SEQ ID NO: 115895 - DNA, 537 bp, Physcomitrella patens
  Intron number 1 from transcript Pp1s194_13V6.1 (locus Pp1s 194_13V6) derived from phytozome v7.0 (chr-ID scaffold_194 ; pos 58549 to 59085 reverse strand)
tcttcatcagtgtgtcttggtgctggaatatctaggtacttggtttctagggctttccagtttaattgtgtatgtggtatacttgctataattttaggaatagattttggaatttaacagcggcgatcagtctgtccgttcaatgtatgaggttagagattcagtacttaaattttgtagctacgaatgttttcaactgattcatacctggtttagtggtcgaatgagtgatttaaatcctaagttctgcttgtctgcattttggcatggtatatttgaacctgagactgtccctggctacctgatgtgtcttccctgaaaaatattagatttgtcgaatttgttcttcattttttcagtttttctggtttctcggtcctagatgtaagacattttatcaaaaactaatcaaaaaagcacaaatttatatatatatatatatatatgcattaattttttatttcttatttttattattactattattattattttgtgacagagattgcagtatcgcctttgaggtggtttcagtct

SEQ ID NO: 115896 - DNA, 810 bp, Physcomitrella patens
  Intron number 1 from transcript Pp1s111_143V6.1 (locus Pp1 s111_143V6) derived from phytozome v7.0 (chr-ID scaffold_1 11; pos 852130 to 852939 reverse strand)
gccctatctccggccgtccgcgctcggtctcacaggtataatccaccagggttcgctattgtggtcacttcaagcaactatcaatagtgcctcaatggttatatcagccagtactacaatttgtagtagagtctccgaatcacactatgtaatggccgtcctattgtttgtatcacctaacgctgaatcttagtgcttttcaaagttggaaaatacaatgaacctatgcgcctctgttgttttgatattcgaaaaatcttattaggactgaatgcagttccgagtttttagatagtgtgctcattcaggatgtttagggcattaatgaaaaaatgaatgatcatagcatagacaatggatgagattgtgctttcaaattagtaacatattggctcaatcatccgctctaaattaggtgctttctaccatttcgaaaatttgattacctcatgtaaatacaatatgacaagcctttccgtcagtggaaccggtttatcgagagtctttatttggtcttccgcgttcattcaatgtagttttaacagaaacttcaggaacaattgcggcgaatgactttattggtcacttcccatgaaatctgtgtgattctgttttctatgtttgagcatccggggtgttccaagataggcgctcgtttctcttacatatttatcctcaaaatcgtagtaattattccagctgacctatgtgatgtaatgatttttcaaaagtaattcactcttagagtgaaattggcttgatgcctacctattcactgtacttgaagtggattgacatgcaggattcgcc

SEQ ID NO: 115897 - DNA, 926 bp, Physcomitrella patens
  Intron number 1 from transcript Pp1s9_112V6.1 (locus Pp1s9 _112V6) derived from phytozome v7.0 (chr-ID scaffold_9; po s 914296 to 915221)
cattattctcccagacgttctttgtacttcctctggtaatttttctgggttactaggtgcaatttctacatagactcacgatgccttgattcatgtatttttccttttgattcgatctatgtatctattatcttgttcattttttctgtgttccaattttctttttttgtcctcctttgttgtctacaaattcttgtcaccgatcttccatattttttttgcctcatcaagcagtacttggccttcagcttgtttgccttgtatctagctgatggcaagtactttgcagtggcactcccatatattctatcatgtctttacttaactttaaatattctgtgtgtaagaaacggtctattttcgtgtttcaaaatctaaataattgaagtcagtgatgattgtgaggtgttttttctgttggatgatgatttagtcatgttcttgcaatcagcgttagatgtaatgtgaacttaagactgcaaaatctggaactcgcatgctttttgagaaaatgtcgtcagtttgatattacttactcgaatgacgttgaaattgtctctatatctgatttcctatcctttatcccaatttagtttttctgcatgatcataactgtctaccttcgcttcggttcttcttcatatcatatagctatcctgtaaacgcacctttgtcgagagagatcaggaaaattgtgctatgaatctctagttcacccgatttctgtctggaagtgttgtgataaatttcagttctggctgatgatcatgattcgagatgagatcgctgggcttggtaattcaaacagacacccttcaggccaacatctggggtcttagccacattggtgccttcatagaggatgctgctgaccaaaaaacaggttcctgatttgtggttttggttgtagacttttccaaaagcgg

SEQ ID NO: 115898 - DNA, 369 bp, Physcomitrella patens
  Intron number 1 from transcript Pp1s15_291V6.1 (locus Pp1s 15_291V6) derived from phytozome v7.0 (chr-ID scaffold_15; pos 1637894 to 1638262)
ggaacgttgtgcaaccttctgaggaaacggctgtggtttgttttctagtcaaatgacatgcattaatttttttattttttaattaattttttgtatcaaagtttttaattttaatgacctgttctcacggttgcaagcaaatttttataacgaacacttaatgtgtcacctcgtatcacaatctaagcaacccacataggacaaatggatatatggtagaaagaactgagccagctgaatcgctgcgaaacgtatgtcgattgcatactacacagcaagtccactgaacagcgaagacttcgccatatttccagttgcaagcaacccattgttttatgaatttgtttttgttatagatccctgctgcac

SEQ ID NO: 115899 - DNA, 779 bp, Physcomitrella patens
  Intron number 1 from transcript Pp1s32_210V6.3 (locus Pp1s 32_210V6) derived from phytozome v7.0 (chr-ID scaffold_32; pos 1460384 to 1461162 reverse strand)
ttgccgtgcagttcgtttgcggctctggttgttaggtacgtaggtccagacggttgtgatgaagcttgtgttcttgttcgcgtgcagatgaagtttggttgcctttgctggttcgtaatttgacctagtttggtgtgattgtgtgatggtaacgttgtgttactcttgttgcgttcgtgcagcggaatgcactggtaggtgatagtcttagctcggttaatgcgagtacttgggggatttcgtaaaaaataactgttgaattagggtagtgtagataatttgataattactggttaattgggttttgtagcggggtctaggccggagttactcgcgaaagtatggatagaagaagaagtgatatgtaacttgcgggtatgtatcgtcttcctggcttagaagtagaatttgacaatactggttgaaaggcttttatgtccttgcatggatctgggatttgagcgttttggaactgtttgttgttaaattctaggaatgttatgattgattggagttagggggaaatttgaagggagtctgctattctgctcaaccggttcagggatgggatgattgcgggagccgtttaggactgtgaattgatagctgcaatataggtaggaagagtttattcaggaaacgatacccaacttttctgttcatttactccgctacctttacgttctctaatttatttttccatatgacctcgtctggcctattcgtgcgaacatgaaagcgcagacgcctgacgaattttgttggacacagctgagtgt

SEQ ID NO: 115900 - DNA, 550 bp, Physcomitrella patens
  Intron number 2 from transcript Pp1s138_118V6.1 (locus Pp1 s138_118V6) derived from phytozome v7.0 (chr-ID scaffold_1 38; pos 655235 to 655784)
cacaacaggttagtgtgcccatagccgatcctgctatattttctttcttattttttaattggttaggcctaactgagaagtttctatgaattcagattctgggtatgaacttaattgtcaaccaatgctgctacctggcccttccctcacacattacacactggacgtattcttaagaatttttgtatagaagtggattcggaattgcctgtgttgtctctccctgtcgtttttatcctcaaagcattaagtttggttagttttttgagtgttcataactcggagatttgaccttgttttctgtcttcattgttttagactgcattgcttgcatgtttaaatatgaactgtctttttacatgtcttgtgagtttccaatgaaatcttattcgctcctgtggtttgcaaagtgtactcaacttgagacaccctttcagataagcaaatgttttgaaacggcttgagatgtttgtgtgtgaatgcggtttaatggtgagacttgcatcctatggagggtttcccaggaagtacagtgctgagattgcacata

SEQ ID NO: 115901 - DNA, 441 bp, Physcomitrella patens
  Intron number 1 from transcript Pp1s77_67V6.5 (locus Pp1s7 7_67V6) derived from phytozome v7.0 (chr-ID scaffold_77; p os 328619 to 329059)
taatagtttgaaaagatcggtaacttggaaacttggtaacggttgcgtgcttatcttctttctggaagtgtaagttaggcctcataagcgaaggcattctacaaaatttatcagtagttgcaagctcttagtggcgttgatgtgatggaatgcttgttgtgctttgtttctgcagtcaatttgtagattatctaattattcaatcgttgtagggttacaggtgtgatgtctcatatccgtatacttgtctgaatttggccaccaccttgcatatgcaggcctcttgtgtatcgctagatttttcctctaagggacgtgttgcctttgatttttttgtacagaatcttgcgtttctcgtttgaagtacctcttgctcatgtgctttttgcgacgttccatattccaggtgcatcggtatacgcggagctttgtcttcagtaa

SEQ ID NO: 115902 - DNA, 933 bp, Physcomitrella patens
  Intron number 2 from transcript Pp1s51_195V6.1 (locus Pp1s 51_195V6) derived from phytozome v7.0 (chr-ID scaffold_51; pos 1224314 to 1225246 reverse strand)
caccagcatatttgaaagcgggacaagatcttcttgtatgttgtcatctcactttttgctcagtgtttggaggatagaaatgattatataacaatgagtatactcaatttggtcacaccagattaacaattcaattatcacttactaccttggttgcttttcctgtccatcaacatttaaatctattcatgctgttcgttgaatatcaaaccttttctgtttcaactactcattggatgttctaaaaataaataacttttgtgagaaatctgctcagcaccctagaaaaatctccacgaacatgaacgtagagagatctagacagctcgctgtaagattgtaaacagtagataagtcgaagatttatttggggttagaaaaggtgggttgaggcaaattcaccggttattgatgatagaggaccacaatatctgcaagattctgcttaccagtcatttctacatatatatatatatatatgtgtgtgtgtgtgtgtgtgtgtgtgtgtacgtgtgcatcaaaggggattgctggcattagtatgagggtttatgttgtatgtattgaagtggattctaatattagtggttttgaatttagaatttaattgacttatgtcatgaaatcatagatttgcggaaatttatgtcttaatttcatgcgtatgtttctcttatttttaattacttgttaactgcaatagagatcaagtactttctcctgttactttgcgcacagtgcacgattagggttaggcttacccaagttttatttaggtgaatagtttgcagattttaacccctagatcttcttaaatcctttaaaatgatcaattgaattaattcgctgaagtaaatacaaataatactaagtagtcattggcatacttactttcaaactcacttgatgtttatgttggacttgatgcaggac

SEQ ID NO: 115903 - DNA, 569 bp, Physcomitrella patens
  Intron number 3 from transcript Pp1s21_269V6.1 (locus Pp1s 21_269V6) derived from phytozome v7.0 (chr-ID scaffold_21; pos 1607593 to 1608161)
tcttggctttaagacccctcgcgaagctattgaaggtatggcttctttttgggtttattcccattctttaagtttcatcaatccgtgttattgggattttttgaaaaaagtaatatttctatgaaggctatgctgaaaataccgttcgcgtagcctttctctctcgcaaggactatgcatttcgttagactgcctgatagcacctcatcgcatcgagtggaatgttgacctaacactcaaggatagtttttttatgactttcgaatacatggcctaggatctgtcatggggggttgtcctacatgactgatagggtataagaagaatttatgcacgtacgtggtgggtaattgcgttttttcagacttgggcgggatgtccaatagctgtcgttagtcgcagcgtcaagcgctaggcagggcccgtgattatctttcatgcttagacgtaaaataaatcccaaggttgcattagggtttgatgtgaatgttgagtgatctgtgctgagatctcgggagtgttctaaactttcaggcacctacattgacaagaagtgcccattcaccgga

SEQ ID NO: 115904 - DNA, 749 bp, Physcomitrella patens
  Intron number 1 from transcript Pp1s135_47V6.1 (locus Pp1s 135_47V6) derived from phytozome v7.0 (chr-ID scaffold_135 ; pos 363813 to 364561 reverse strand)
gcagtcatcttaacaagcctcttgaccgggtatgtagccgacccagttgatgttaggtgtagtttttttcgtatggaacgatgtagacgtggtattggtttagctgcggaattctatggtgttatcggtttgatttctggtttattgcttcgcgagtagtctgcattgatcggtattggtgcgagaaggcatttttcttattatcgcagaccttcttttttcctcctttgttcttgatgttattgaatgtaatagttggaattggagtgctggagtaaaatcgcttgacctaattgagaaggctccggcttcaatatatatatatatatatatatatacatacatacatataccagttgaacccgtataacgaacaactagtatatatatatatatgtgaaaaaatatgcaaaaaatttagttaatgtcataacttttttgagggagaagtgaataatatgtgatgttaaggtcctatggatctttaaacctggttctgttaatgccctgttaattgctgcataacttaacttttgttttacttttgatgaaaacaatgagatatgcattcaatagagatggtttttgtctctcttcttatttaactccgctgattttatacaagagatatatgtgtgtgtgagtatgtgcgtgtcgagtcttttagggtatgtgcgtgcgggaagagttgttctcctgatgtacctttggaggttgctgatgaaatgttgggtgctcacactttgcag

SEQ ID NO: 115905 - DNA, 446 bp, Physcomitrella patens
  Intron number 2 from transcript Pp1s4_22V6.1 (locus Pp1s4_ 22V6) derived from phytozome v7.0 (chr-ID scaffold_4; pos 217200 to 217645 reverse strand)
tttttcgacgccgtccatatctttcactggaaaaggtaacgggtcgtcattgcagagctatatatcacgtcaggagtggaacttcgcggaacaagaatttctgcttttgatcatattgacatttcaagtttgtgctgggatttttgttttatgtttttcttcatttttttgtgttttctcctagctgactctgtatcaactcattttcagagaatttggttccgaatttaaaggatacaagtctgttccatttctgcaaagttgtagatcgagtctcggtgtgtttacttcgaagctgccttttcattgcaccatgaggatggttttgtaggaatgcctttcaaaggaaagaattttcggataactgattgtccgtatggtgcctcataactcttattcaacttttaacaggtcagttatttcagaacaaggcggacagaggaggg

SEQ ID NO: 115906 - DNA, 670 bp, Physcomitrella patens
  Intron number 1 from transcript Pp1s16_10V6.1 (locus Pp1s1 6_10V6) derived from phytozome v7.0 (chr-ID scaffold_16; p os 62313 to 62982)
ccctgtctccattgttgcacgaagcagcccagctggtaacccattttcctctcgccgctcctcgattttgcaaatttgaggttgtcttcaggttttctgattaagtaaaacgcattcttcactcccgttgaaccttaaaagttctttggttttgttttgttttgttttttttatccagatgaacatgtttgatcggaaagctgaatcgatcagttcaatgaatagaatgaagctttaatttatttatttttgttcctcaggtctggatggtgtttagatggggagcgttaagattccctcctctttaatccacattgactagaaagattgacagatccgtctattgaatctctagaatccatgaaatctaatttgtctcgacattcacggggaatggttgattcggctcactgaacaacctccctcggaatgtttctattctatatcgatcaggtggtcgttctcgtatttagtttgaccataagaaaaccaacagtttatttttgtgattaaataggacttacatgtttttaaagagaattctcgaccagcgaatggaagctgggattataaatgtcatcatattctgggattggctccactaaatcggaaaggcgactctcactcatcacgttatatgttgtgcacagacacgccatcggtagagacg

SEQ ID NO: 115907 - DNA, 237 bp, Physcomitrella patens
  Intron number 2 from transcript Pp1s197_44V6.1 (locus Pp1s 197_44V6) derived from phytozome v7.0 (chr-ID scaffold_197 ; pos 196062 to 196298)
cagcggacaacgctcgcggcacttcgctcttgccggtaactgttttttgaaatgcaacttttatttcacccaacattgcaacttttgatatatgctggatgttagtaacggtatagcttgtggatctgcaactttaattcttcctcacctttttctactgcaacgagatgtgcaacagtgtcaaattaatctctttatttctggtttcacaggaggtgactgttaagacccccatct

SEQ ID NO: 115908 - DNA, 552 bp, Physcomitrella patens
  Intron number 1 from transcript Pp1s72_74V6.1 (locus Pp1s7 2_74V6) derived from phytozome v7.0 (chr-ID scaffold_72; p os 379214 to 379765)
gattgctcaatctgctgtcggaggtctggtagcgggtgtgggattctagtccattgggatgattgcactcaaggattgagtgtcgatgtctgaggttagccagtatagactgattcttcagagtaattttgaggtgtgcgaatcaagacataatttagcagatctggtgacgcagagccagatatgtgcttcttggagtcatgtcgtgaaatcggcgtcgagtcttagtttcattcagcatatgctccgattatgcgccttggaatcttaggaatctattcgatccaattaggtcagaggacctgctccatccttcggcaaaattatctttaactagcgagcaccctagtcacatgattgttgcccaattttaactaagaatcaaatttagcaagaacattataccctttcgttttggaatgaaggatgggcgtgatttttattcgtgttttgtgcatctacccttttccagtttgaacacatcgcgtgacctaattggtaaaatggcactctgcaggttgtcgagagggacggcgcaagaatataacatta

SEQ ID NO: 115909 - DNA, 933 bp, Physcomitrella patens
  Intron number 1 from transcript Pp1s280_57V6.2 (locus Pp1s 280_57V6) derived from phytozome v7.0 (chr-ID scaffold_280 ; pos 426132 to 427064)
tcttccaactccaaccgagcaagacccaagttcaggtatgtcttgtgagcttcatcatgattgtttcagcaaaacataaatgtttggctatacactagcatggagttatttgagttcacaccaccgggtaatgaaagcgcaagaattaaggaaaaaattacttcaggggttatgatcattcctggtttgttacgagaatattacggttgcaacggacacagtactacactgccattcaaagtagtggatagagtagtcaccaggtaattactaatcgtgattaggtggacgagtaggcgagagtaactcctgatgtggcgccatgccgttcatgctgaaactgaaaactgaaattaaccgaactgctgattatgcctgattaatggcggttttctaatgtctctgcgtcggccttgatttcggttgagaagagtaactttcattgtgcgtgcatgtcgtcttgtaagttgccggcttcctgatctctttttccctcgccttcagtttctgcctcgtcggggtctcggagtttgttttgggttgccaagagagcttcaattttaatgagagtgaaaatgcgattgaacgttgtgccttgtgtgttgacgtggctggtattttacattaataatgtttttaataatttgaatattcttgatgagcgcttacctatctgataaatgtgtgatttattgttgtttgagtgactttttgtccaaattcgacccttaaaagttttttactctgctgttgccatagacctgtgacgaggtgatttacgtaatcaagttattatgcttccattgaaaacgttggcgaattccaagctgattcatgaaaggaatagcgaccaagtgaagataagtgaacccaaattagtgtagttctacgatttgcggggatacagtgatagcaaaagaagattcagcaagt

SEQ ID NO: 115910 - DNA, 1070 bp, Physcomitrella patens
  Intron number 1 from transcript Pp1s173_137V6.1 (locus Pp1 s173_137V6) derived from phytozome v7.0 (chr-ID scaffold_1 73; pos 781755 to 782824 reverse strand)
tgcggattcagacgcaaagtgcgaagcagatacaggtgtgtgttcgtgttcgtgtgtgtgtgtataggtctttctccctctctctgtgtgcaggtttttggtgttaatgctttgtttgaggtgatttggagggtttgctagagcatcttgtgtttgttaaaccctatcctgtacatcggaatttccctggtttgttccactattctactctaccggtgttcaatttcgcgagagaagtcgaagagaagtgtttgacgtcggttgagcacttcaactgatgtggattacgattgccggagcgttctctacttgcggtatatattgcgtgtagctgtaatacaagtgcaaattggcttgccgtttcggttgtgtgcgtccgagcctcacttctgcacttttagcaggaaggtcatgagtggatatggcaattaacattccgttactgttaggatttgactatttctgtgtagtgaaacgttttctgctcgtttaatcatgtaaacgagctgaatgaattaattgaaattttggaggttagagacaaatgatctgcaattatttccgctgaatagctcttctatggtaactcgatcagaatgtagtggtttaacggggtgcatttcggtatggagaacgaatcgtattcttctactcgtaaatattctggtgcaagttttttgattgaagattttgacgtatttttgtatgcgtaagttgtctaatttcgatatttcagttgggatccatttgataagcagctcagactaaatgtatattagtctgcaaaatttgaattgagaactggcatgacgctttttataatttactactcgatcatagggggtgctgagtcgggaagagttacgtactattgatcacttgctatcgcaaaaaaattcgatttgagtgtatgtactatttaagtttaaaaaaatgtgttattaacgcttgtgcactgacattattggttaaacaagaggttttcacgaccgtcgcgaaatgttttaagattcgtttgctttttattgtttacagaaatttgtaaggggaaggagagaggtggctgccgt

SEQ ID NO: 115911 - DNA, 497 bp, Physcomitrella patens
  Intron number 1 from transcript Pp1s89_261V6.1 (locus Pp1s 89_261V6) derived from phytozome v7.0 (chr-ID scaffold_89; pos 1293253 to 1293749 reverse strand)
ttattgaggtgcagagctattccttcttccttcgttacctcttcactatttaagaaatacttattgacgttaacgttgctgggattcttctatacgaaccaattgaatagctcgaataccgttgtatgtcactcaaactgagacccacttcatggcttaaatcaaaggccctgaagagtacttctgcaggtcccttgcttgtcattcacagcctcttttttttcttcttttttcttttttcttcttggcaaatcacagactgtatttacgtgaaggataacgattttaaaagtggactgatgtgagaagggttagttggattgcattccattcgaagggtaaaaaataagttgattattagtgtttctagcaattgaatcagatcttcttgcgaatgctgaagtgcccaagaaccctggcagtttgagaatgtctcgaaggtccacggtactccgacctttggcctttaagtgtaatgagacctgaattgattgcag

SEQ ID NO: 115912 - DNA, 552 bp, Physcomitrella patens
  Intron number 2 from transcript Pp1s77_246V6.1 (locus Pp1s 77_246V6) derived from phytozome v7.0 (chr-ID scaffold_77; pos 1365433 to 1365984)
ttgcaatccattggtaagtgtgaattcacttgagtctgtgaacttgttttaggtgcttcttgaaacttagtccatttctaaaaccctgcgtgaatgacattcgaaatgagtcgatcggcatttgttttagctcacaacagcagacagaaagggtgcttgcaaatattcaagaccgctgttctcacatgaacaaacgaagtgaaaagaaatcgtcacttagtttgtattgcggtgccgatttgctaaggttgagtccaactatcagcttaactagtgaaattttgacaaaattcatccgctacgaattcttattgaattgagttttgaaaataatcaatgacgatttttttgttttgtttttgatttgccgtaaccttgaagtagattgaacaggatttgagtaaataattgatttgagaaaataatggagttgagtgatcaagtgtgcaggaaatgaaatgagtcaattgagctggatccctctatgatattatcgttgtgtaaaataatggatacatagattgatgcaacaacactttcttctgtgcaggc

SEQ ID NO: 115913 - DNA, 910 bp, Physcomitrella patens
  Intron number 2 from transcript Pp1s22_380V6.1 (locus Pp1s 22_380V6) derived from phytozome v7.0 (chr-ID scaffold_22; pos 2292743 to 2293652)
gcaggtaatgtaattctctccttgttcagagtattttttaacttcctttggtactattgctactagatcatagttcggcggtccgcattagtgatttctaacagcttagtccatttctttgtaattgtgtgctccttgggtgagttgttcattacctatgaaagggtttctttctcttttgtttctgtatatatatatatatgtgtgtgtgtgtgtgtgtgtgtgtgtgtgcactccgcaacgcatttaggtgaaaggaatgtaatattgttaagagcgatctagaatttcatatgcagagtgtatagcgagttcgacttcatgatttaagcttgagttctacacacatgtgcgacaaatccttacagtctgcgtttgattctaacggtatgaagaattcccctgcatgtccaagttttgaagtgacatctttttcgattgcatttaaacgggagataatgataaagaaaattaaattaaattaaattaaagatgaaagagagtgctttactcgccttgtagctgagcgagtctataagttctcatcgtgtactataagttctcatcgtgtcttatacccggcactctaattttctcgaaagtcgacagtccagaaagtgtagtactctctctagtgtacgcactgtatgatcctcaagcttttcatggcactgcggaactttggcactgcggaactttggtactccgaacgaggatttgtttatgacgaagtgagacatgccccttcccctatatcccatgagtgggaaacatgcactcaagttcttggtcaattactctcatcctttagtagcagcaatgctcccgcagtttttatttactatcgtcgcccttggcgtgcctgaacaatatatctaagtactcgctgtgttgttggtgcaggtggaca

SEQ ID NO: 115914 - DNA, 865 bp, Physcomitrella patens
  Intron number 1 from transcript Pp1s218_122V6.1 (locus Pp1 s218_122V6) derived from phytozome v7.0 (chr-ID scaffold_2 18; pos 710882 to 711746 reverse strand)
gtattgcggagttcgtgctaccttcggaacaacaggtttgtccccagaagtgactcatttcgaaaaaactacagtaattttttgcatgttggcgggtttgaaaatatgatttgcagattagaccactaatttatacacaagaaaagtgcaaatacttaaagtgcgtctcacgtagcagcgagaacttgcatcaggcacctccaatttttttttattttttttattttttttaatatcttggggggattatgaggagaaccctatcaatatcaagctggtttagagctcgattggtttacgtactttgtgtgcgaaggtgacttgagtaacttagtgaagcggttttctttcgtttctgaacaatgtaacttctatatttgagttcttggaaatattgtttttcatcttaaaggcacttcgagtcatcctcttaccaaaagatattgcttaagaatataatctgactggacctcatgggataagaaagttgagattaccgtaagcattacgccaatgctgataaatctttaaggaggtaattgaggtgagtgaggatcaggtgctacacacagtctgcatggatacaaatcattctaccgattgtctatgtcccaatcgcatgaacggtgaccatgtcttttgtgttatattagttttgcagtatattactgaatgtaggagtgtgcggctgtttaactttaaactactgtataagttcggggtttatctgcctactgggatgtagaagaaatacaatgtcttaacttgtcttcaaccctggatatgccagatcttagttactatgcttgtcgggcgcctttgttttgtagaggcgaagttcagatttgcctactcttctccgaag

SEQ ID NO: 115915 - DNA, 895 bp, Physcomitrella patens
  Intron number 2 from transcript Pp1s194_9V6.1 (locus Pp1s1 94_9V6) derived from phytozome v7.0 (chr-ID scaffold_194; pos 29606 to 30500)
gattgaggagcaggattctgatccattgcagccatgtaagttcaaatcagttcaaatcgaatataggcactttttgtgctggtggcaaatagacttcacagggttcctacatcatagttttctagtctcttaagatgttttgtaagacaagaagtgagtcgcaaaacacgagcaaacgaaaatttgtccttgaacaagatattaatcaaaattcttgtctcgatttttcaagtacgatttggttgacactctgattcgcatattatagatacagatcgattgctacatacagctgatctaggatgaagctctgggcatttaagtcttatatttgagttgttttcttcggaatgcggatttactttattttggatattcacaaacccatgaattgtgacactcaaagttattggttacaaaatcatacaactgtaatttttaaatctcatttgtaatcatttgggctatttcacaactgtggaaccctcaaagaagtgtatcccttcctggtgccagcatatccagaaggtgggagtgattcagtgcttgcgaaaaggaggaagaggtcatttaaacaagaattacaaacaatctgggaggtctgaaaggcctagagttacttgttgtgctggtgccgaggagttgtacttatccgacaaaaatatcactccaatcacattgtgggaggtaggtttgcgttgcgactgctgttactttgactgaacgccttgtcatgagcaaccctcggcaggctggatatggtttcgcagatttgtgcacttatgaattctttggtaaaattgcgaccatatttgaatttttttattagcagaatttcttataaataattttctgtgcagagcctcaagccttccatcagctacctcactaaagc

SEQ ID NO: 115916 - DNA, 871 bp, Physcomitrella patens
  Intron number 1 from transcript Pp1s335_17V6.1 (locus Pp1s 335_17V6) derived from phytozome v7.0 (chr-ID scaffold_335 ; pos 99086 to 99956 reverse strand)
agtctcaaggcagtagctggaaagcaggtgtgttctattgcctttatggatcctctcgtgtgactgccatattggctttcccttcgcgattggcattatacaacatgtgatccgatgtatatagcaatcggattttctactagatgttcccgctcaattctattcggaatttctctaacgttatgagatctgagagccccgctaggagccttgtatcacgttctttgatactttcattgctgcattgcctgaagtgttttgggtttattggaagaattatcgctatggaaaattgaagctagtacaatgatgccagttagctagtctggattccggagtattttgattgagaataatgggtattgaaagtgcactcgtagagtgcaggcatcgataccacaagaattttctctgaacaacggcgaatacgctttgtttatcagtttgtccctagtcctatgcttcctgtagcgagtcatagaatcctggtttagttagagtatcagtggatcatggcacatctttagggcagcatcttagtatactggtgtctctattttatttgaaccgaattaaggggtgtcctttcaattcggtaatccataagttttcgtatcgaaaggatcataaattagtaaatccgtgctttttcaactaatcttttggtttgaaattttaatcttatttctcatctcgcgtacatctgcagaagagactttatatgcgaggcaaatgcagtattatgtttgagacatggcaggcatgagagctcaagtttgtttataattttcaatttatttctactagctttgaatggatcgaagcttgtgatgcaggtcttctgcgaattggagctggttttgtgctagca

SEQ ID NO: 115917 - DNA, 371 bp, Physcomitrella patens
  Intron number 1 from transcript Pp1s641_1V6.1 (locus Pp1s6 41_1V6) derived from phytozome v7.0 (chr-ID scaffold_641; pos 4073 to 4443)
gttggatccgtccattaagaaggtacgcttctaaattgatcgctgcattacgcaagtaagtggagaatgttacgatgctttgttcttttgatcgttcggtatcttgaggaaaattggtttttgttctagggtttgtttgttttcttttttgtttgtttcgttgttttctcgttggttatcgaagagtgcattataattgttgtactttcgtagaggttttggtatgttttactggacgagcttttagcaatgcagccccaggtttgtaattaatgcttctcgggttagtattgcacgctagttagggtgattcttatttttcaggccggatgtgtctgttgaaaatctggaccttggtttgtgcagacgga

SEQ ID NO: 115918 - DNA, 648 bp, Physcomitrella patens
  Intron number 1 from transcript Pp1s162_170V6.1 (locus Pp1 s162_170V6) derived from phytozome v7.0 (chr-ID scaffold_1 62; pos 975526 to 976173)
ttggcgcagctttcttgatcaagttctgtgagtaggtgagtgatccttgcgctttcttgaggacatctcgttgttgtgatcagttttgtctagaatgagccatgttgggtctgtcctcagtctgtatgtgatgtgaaatgattcacgatggctggtttgaatgctgatgaaggctcaagagtgattacattttgtgattagggtattgtttcagctccaagggcactagtatactgtttgcaatcaccttagagtttctgattaatctgtctactttttaacagatagaggataagcatatttaatcccaagatgccaactaattttggtgtatcattctgataatattgtgacaagcttcacatttcggaaaccactgactggaaccctggctcacattttcgcacttgttatatcatctaatatattatcatcacatcaaagttgttactctgtgtgtggtaagcccaatctgaatgaaggatactatactggatgaatcaaatggagagggttgttgaactaaacgacaattcagctcagtttcttaagtcctgaatattcttcccaaacattgtcaactgaatcgaactgaattgtcgttcagggcttaagcaactgaactgaaatttgtggatttgtttaggg

SEQ ID NO: 115919 - DNA, 506 bp, Physcomitrella patens
  Intron number 2 from transcript Pp1s162_170V6.1 (locus Pp1 s162_170V6) derived from phytozome v7.0 (chr-ID scaffold_1 62; pos 976597 to 977102)
gacatttacggctacgaattaaacaaattttccaggtaattggccctttctttcagtgttttgcttcttcttcttttaaactctactctcatggtttctttcctcctcaatggcggtttcattctttaaacgcatcatttttgcaattaatcttgaatgtgtctatagctcggaaactttactagggtgtagtcttgattagggctccttcaggaagtaatattgaattttttaaaattttcatgtttgttggcattttgtacgagtccagaagtgaaaacattagagtgtattagtgtatgatcaacctctacatgaggaggtgtcagactgtccaaatttgatttgtttttaaaaaaaaattgtattaatgctcaagggtggtttaagaaagaagagtttgaatatgtaattttgaaaggtttttattccgttcactgtattgagaccattctctccttggatgtccagatctgacacaaatcttgttcaggccattgttagta

SEQ ID NO: 115920 - DNA, 504 bp, Physcomitrella patens
  Intron number 2 from transcript Pp1s67_216V6.1 (locus Pp1s 67_216V6) derived from phytozome v7.0 (chr-ID scaffold_67; pos 1455339 to 1455842 reverse strand)
gtgaaaagcatcgaagatcaacattttcttatttggtacgtgcactgggtcatgtataattttgttttggtgcattcattgttcactgatccgtccattaattcctcaccttatcacaaaaaacacgcattaaagtgaataatcctaaagaaaaagaaacatccacaaaatcaaagacaaccttctagattatgtagctgacggaaacactccacccacaaaaccgaaaagaggccaattgtttgtctcacatgcagaaggcgccaacgtcaacaagagccgcaatctgcatgacgtggtgcttgcaagcatagctttcgtttttttccacccggaatgattgtttcgctttatactgcttacagatggacgaagaccagttgacctaatctcagagctttgccgaaaggtttaagggtcgtgcattcgaagtgagacactgttactgtctgtctagccacacaatctcacacattctagcagggcggcagaggcagcaagcag

SEQ ID NO: 115921 - DNA, 662 bp, Physcomitrella patens
  Intron number 1 from transcript Pp1s47_13V6.1 (locus Pp1s4 7_13V6) derived from phytozome v7.0 (chr-ID scaffold_47; p os 83177 to 83838 reverse strand)
tcagacctcgcagaagctctccaagttagccaaatgtgagttaatttgtaaggcagcttaatgttggacggcaggatggtgtttgtaagatctggtgtattttgagatatttatgggaattgtgtgctttctgaacaaagtagtgcaagatcaagagggtcctcgaaaatcggagcatatttgatggttttagggtgcgatgcatggaagagatattgtcgtatttagataaccaagcgttggcaaaagtactagtgtgacattggacgagtgagtcgcgtctcaggttttcagcgaagtctcaattggtattcttgttgcatatttttgagttctttgcatggggaatttacattgagtgtatgcacctgaatggatccagatgtcctgtttcttaggttctaaatgtgtggtcaggaaccgtgcgagatatttgacgctaattcacgtcgatttagccaggtctaccagataattgtatgatgaatttatagtgttttgaccacatttgatttatttgtataaaatgcatgatttgtgttaacttttaattacaagatatcccaatttatgtgaaaagttggcactgaataattattccctatactaataactgacatcatgctgtgggggtttgttgtacagtggcaaagcgaacatct

SEQ ID NO: 115922 - DNA, 789 bp, Physcomitrella patens
  Intron number 1 from transcript Pp1s77_4V6.1 (locus Pp1s77 _4V6) derived from phytozome v7.0 (chr-ID scaffold_77; pos 12649 to 13437)
tccaggttagttgatctctggccgaatctggggaattttttgattgagaaggccgaagagaaatccaaatcgactgtatctgctcgtggttagcggatggtttaggtattttattttgtaccggtttctatgtgggttatgaggagggcattagtgtttgcagcggcacaaccctaagatagtgcttttaggttttaaaagaattagtgattgggagatggtgaaaagtctctaacttcgtggcattcatcaatcttgaaacgataaaagttcttggtatatagttgtagtttataaacttgaactccattttctagggcttgagggaatcctaatagggatcagtagtaccattgatggattgtaggtggcgattcagtgttgaacgaagtttttttttttttttttttttttttttttcctgttttgatcggacgcatgaaactgctggaggtttcaattgttcactgcatttagttgatcccctgagttcaaatgttgattcctatggtcacctaacaggacggcctgaaaaactatgatactgaagtaagatgtgttcgcagttatttacttagagtttaccagttgagttttcgctgatcattgcagcctacgctacccagttctcgagaacttctgtggaacttattttagttattctaatttctaatcatatacatctatgaattgtagggtttttgtactgtttgacattcacagacactttagcttcatcgtttgttcttaatttgtcaagggcacttttgcaggttcacgaattgggat

SEQ ID NO: 115923 - DNA, 829 bp, Physcomitrella patens
  Intron number 1 from transcript Pp1s85_93V6.1 (locus Pp1s8 5_93V6) derived from phytozome v7.0 (chr-ID scaffold_85; p os 464677 to 465505)
tgtcgttgacacttctgggcctttggggccatcaggtttgttcttcaattcgtttgagtatttgatatgttggcctttgatgttagtcttcatggctgtcggccgttttaaactgcagtacttagtctttaccctcttggttttaaaaaaccaccgtacatatacgtgtactttctttttgttaacttttccctgctaactagttgtctttcgaatttttaccaatctatatagatttatgactgtctgtaattttaatcctagtcacttgagtatgttatgcgtgccctttcattgctaggtcagattctaatttatggtgaataatgcgatctgtgatgttctctgcgcacgacattcaaatcgaacaactcaacgagtaatataatttgctgtagttaattgaattctttgacggcttctgaattaggatcgcaatagtggttttctttagagtttctattcaacaatgaagtggatgtctctgcacattcacaaccttaacacagatgtgtccgaaaagtttcaagcgaacctggttgctaactgcctacgtagattactcaagtatctttcctaggccgtgaacgctacagctcttatacatcttgttgttgatgcgtatattttctcgtataggctgtcaggctgccatgcaacattctgtgcagtgtttcaatcaaggggaaagctctgtgatgtttattctcggtattacgtgtccatctaatgtgaattctatggattgagaggatcacaacgtcagcctctaagtttgtcgagcatgctccgcttgcaggtgttaaagcagagcttgtggactccgacg

SEQ ID NO: 115924 - DNA, 1066 bp, Physcomitrella patens
  Intron number 1 from transcript Pp1s330_19V6.1 (locus Pp1s 330_19V6) derived from phytozome v7.0 (chr-ID scaffold_330 ; pos 141353 to 142418)
cggacctactgttgggaatcaagacacgatccaaggtccgagctttcccctggaatctttacaacaaatcatcacctcagatctctacgcagctagaagccacaccagaggtacttcttctcgtttcaaatactttgcaatttgcatgatttgcaagtcactaaatttcgtcgcatcttctgcaccatgagcctgaccccaccacgtatagttttttttttaccagtttctgcacaactgcagcttcaagtctgattttggttctcaatggcaagttgaaagaagttgcgaggattctgttgaatggcatttgacagccatctcaatgacaccctcacatgatcgatttgcaatttgcgtctcagtcattgaaagcaccaatgcacttgctctctagcgaagacaatatgctttcaaaattactgtaactatgacaaatttcttgctgaaccttcgagctttaacataattaaaaccctctcgaagtgagaagtcaaactattcactggtattaacacgacagtcgccgatggttttcatgcattcggaaggattgagcacatccgtacctcaatataaacgctggacataagttcgctacagaaagacgtcacatgcaatgcaacggttccactttttgtaaggtagggtgtgaatttaaatgaatcgagctcatcatttggatccacacgtgagctacaaaaaacaattgactttcactacatatttttcataacacaactcgaaacctggggcatccacctgatcgatgtacttagagattttatcttcatttgtcatttcaaaattttccccacaaatgaatgatcgttcagatcaaagaataacaccacctgacctgcactgggtacaacaacagcaaccctagtcaatggcaaaactttgaattaccctattgcacaagcattggctacctgaatcctgaagcaccatagcacaagtgcattctcaacttcactctcctgccaaaagccttccttaaaacccaatgtgctgtcggatcactgcaggatctggtggacatacctggacgacttgcaggaat

SEQ ID NO: 115925 - DNA, 846 bp, Physcomitrella patens
  Intron number 1 from transcript Pp1s110_43V6.1 (locus Pp1s 110_43V6) derived from phytozome v7.0 (chr-ID scaffold_110 ; pos 202195 to 203040)
gatcgctcccgggtgagctcgaagcagggacgccggtaaattattccctcttctttacagcattttttgattttagaaccaatactagtgtagggcaatcttgctaatttaatacgaaaatggagcagcattatcttaatcccgcatgtagcaggtgtctgagcattgtataccagtggaattcaatttctacaagtttttcctgcattcgacatttcatctctgcctgtgacgcgtgtagaacaaggacttgatttagttttagttttagttttagttttttttttttttagtttttagtttttagtttttagtttttttttttttttttttttttttttccccaaattgtggtggccagaagccgaatgggtgcaagggctggtggtaggtggccgcgtaccttggcactatagggtccatagcctacggaaattagattcttgtatgagttattaggaatcgactgcgcttgatctaggttcagctaggtcggccctagttagtgcatctggtgtgaaaatgttctgtagattgaatctattattttgagatcatcaaactaattttacagtcaccgggattcagcttgttaggttctcagttactggtgccggttgtactctgttgtctgccggaagttgttcggtgcaacgcagttttagtctcggaataatgttgttcggagtatcagttgtttcctcgtacgttgaacatgtaattatctgttgctagttttgatctctcatagagtttcgttatacagtgtcatttttccacggtgcagaacccatccttggttatttttcttgatacctttgtaacgtacttgagatttctcagatc

SEQ ID NO: 115926 - DNA, 836 bp, Physcomitrella patens
  Intron number 1 from transcript Pp1s341_8V6.1 (locus Pp1s3 41_8V6) derived from phytozome v7.0 (chr-ID scaffold_341; pos 27894 to 28729)
ttcaaaggaaggctcacaagctactcaaggtgcaggtgtgtgtggcttcttctacatcttggggaatgagtggatgaggaaacaatgtatgtatttgtttctggatatactttgtcaaagctcaatactaaaaaagtttcaatgaatttgtgcagcaatgaacaacacatgtgagtacattggactaagtaacacttgtgtaacgaatttgccactgatgttcacatgttttccatttgcaatattcactctgcaatagaaaaagaaattgatggtaatcctcattcaaactcaaggaaagcaatgttttagatacacaaactctcttttttattttattttttgcaggaaaaaaaaacaaacaaacaaacaaacaaacaaacaaaaatgtaatcccaaaatcaccaagaggtgccaagttcttggtaggtctttttgctaatgggatcctgagctgcgtgtgcccgggccctaaagttcatcttcatgaaaagagttgctaatcacattgcaaaaaatggaacatccatgggtgctcgctgaacaactcaatctcccttcaccttgaacccacaaaatacttatcagtttctgtgcagcaggcttccttgaacatgcatcagatatcttcattagcaattcattcacagccggaaaatcaacagattgtggatttgaatcacatgaacaacggtgattaaaatcaggtgggctgtgacgagattaaaaaaattgtacccagaattcgaaaaccgtcatcctccgctagatcagttgttgttgtggggactgcaaagaggaaaattttgtgaacagggggttcctgggatttggat

SEQ ID NO: 115927 - DNA, 397 bp, Physcomitrella patens
  Intron number 1 from transcript Pp1s372_18V6.1 (locus Pp1s 372_18V6) derived from phytozome v7.0 (chr-ID scaffold_372 ; pos 87607 to 88003)
gagactctgtcttcgcccactccacctcgcaggtaattcgccttcttctaatttctttgattttgtttctttcctctgtttgtttgtttgtttgtttgttttagtttgcacaggaggttttctcaggttcacggattagtcttaggagctgtctgcttgatcgaatgcatccactaggctgtgcattcagtcgtctgcacatagcagtgtggattctggtggcgtgttgcatgtaactctgctgaagatgtttgaattagggtttcagggcgtatgattaagcttatatgtaaaaatatatgtatatttattgttgatttgagtaaatgtgaatttgaattttggcctttcgttgcattcagggcacgtgaaggagaaggattacaacagtactaca

SEQ ID NO: 115928 - DNA, 468 bp, Physcomitrella patens
  Intron number 1 from transcript Pp1s148_48V6.1 (locus Pp1s 148_48V6) derived from phytozome v7.0 (chr-ID scaffold_148 ; pos 327494 to 327961 reverse strand)
ccttgctccaccggtgagtttgtcaggttttttgtgggtcgtagctttcggctccctcatgtatgtgtattcattcgaccatcctgatggtgttgtttctttctcattggacctcttcctgaaaatgttgccttctttatttcaatcttttatccctttttctttcaatgctttgtcatctaatccttgacgaattagactgctttgatttgtcctcaatgccttttctccaatcggtttatcgattttgcatcccctgtgcaacccctgtgaggtcgtttggtagtaagactcgattgtgtgttcgcgtttgtagttcaggcgataccgctgccaatatcacctcaaatagaactctcgcgatacattgttggaggaattactcgctgggattaaattagagaagaggtggccttttgactaattgagagtttctttgtatttcttgctaggaggacaacaagagtt

SEQ ID NO: 115929 - DNA, 633 bp, Physcomitrella patens
  Intron number 1 from transcript Pp1s79_115V6.1 (locus Pp1s 79_115V6) derived from phytozome v7.0 (chr-ID scaffold_79; pos 731505 to 732137)
gaggtaagtcgtgggttgtgtgtggctgtgcgaggtttgtttgcgctgtgtgggagtgtgtattttggaaggggtccgttggagttttcgtgtagttgttgcggtgtggtgcccaaggtttgattagtgtgggcgtagagttggagctcgttgtgaattttttttatgaagaatacaggctccttttttcaagtgtgagctgaatgtcagcctgctgcgcctcttagctccacgattgaattattaaaccttggaaattgttcgattgggaacctcgatcgtcaacagaacatgaggaattcacggtcctggaaaacgaggcagttttagttgcgacttatcatagctgtgaagtcttgaaattatcattttctttcacaaggatgagctgcaatgaactgccaaaaaattgttccgctgagagaacctcaagaaaattagtctagcgcatgctcgggtctgcagaaactaatgggtcccttgcgaatggtacctgggcaaaatggcagccagctaggtgtcgtcgctttcattttctatcatatactggtgatttcctttggttttaatttaccagataatgcactgcttacaccagaaactgttaagtagcggatcaggagcacttacaaa

SEQ ID NO: 115930 - DNA, 359 bp, Physcomitrella patens
  Intron number 1 from transcript Pp1s148_146V6.1 (locus Pp1 s148_146V6) derived from phytozome v7.0 (chr-ID scaffold_1 48; pos 943218 to 943576)
gaggaagtagtgttattattgctgaggtaagcatttctttgcaaccttttttgaaccatgtatttcatttacatggagcatttcaatatcatgtttctctactattgacactagtacaacaataatttaaattttattgtcacaaatttactcttccagtgctatattttgccttaatttttcttttagacaaaaaatggtttttccattattaagtattttatataggttttttaaaaaaaaacaaaaacaaaaaaaaacatttgtttctaacaacatacttaacattgaattttattttgagccataaaggtttgattccactattaaattattgcagactttgaaatacttgggtg

SEQ ID NO: 115931 - DNA, 973 bp, Physcomitrella patens
  Intron number 1 from transcript Pp1s64_180V6.4 (locus Pp1s 64_180V6) derived from phytozome v7.0 (chr-ID scaffold_64; pos 1495644 to 1496616 reverse strand)
cgtgtgacctgagtgacaacggtcagttgctgggctctgatgctgtcttattagcgtatgtttggcttattcaaaatctagtggattcattgactgtgggatgcggtctctgttggtcggccattgtttatttaatttatgggctacttacgaacttcgcatgattggagtcagatagatttccgcaatcatttgcttcgagcactagctggttcttaaactttattccactatattatgcagcagtctttctcttttactttctgcagctagatttttgtttttcgttcaaaacagcgaagctctattgttttgggtagtccccatctacaacatggatgttcggaattcttcactgtgtatcaattcgtcattacattagtttcggactttagcccatgtagcaattttttttgcattgttaagcaggaagatcgtttcgccattcctcactctttacttgctatttcagtcttgtgctcacggaaagctacagctctgacagtctgtataactcggtagagcccaggaacgattctcttgccagttagtctcgaaaacgaaatttatgggttatttaattggttgctagaacaccttacatccattttcttaccccgttgacttattcttccgttcagctcacagtagattatatcgtgcgtattattcacatgtgaactcttagtttgagatatagggttcttttgattttacgtgtgttaacaccattgttgcagatgtttttgtaactgaatacgtcctgtttgacgcctcatcctcaatcttcgttcagctcttaatttgagaatgtgctcaactgtcatgacgaggacgctattgttacaagtggattgtttctgtgtttgatatttgcatgtgacgttgtgctacagcttttgattttctctaacttctgtactcttgggctttcttagaagcctcttacttgtgcaggaagcggccaattagt

SEQ ID NO: 115932 - DNA, 589 bp, Physcomitrella patens
  Intron number 2 from transcript Pp1s157_18V6.1 (locus Pp1s 157_18V6) derived from phytozome v7.0 (chr-ID scaffold_157 ; pos 132216 to 132804)
taaaacacctgtgatccaggcaaaacaggtaagtcaccattgtccgttttcaacaacagggcgttataatttacccttttgcagtcataacaaactgaaccaaacagcacgcgttttaaaatttagcgaaaaattgtgacaatcaagcccttcactgaactctctgctcatttgaagcatcaagcaagtctagaccacaagaagtggtacatgctgttgaacgctgaattcttaagaagattacaattacaatttattttgaaaagaatcaaaaactaatttttttccttaaaaagaagcaatgttacgttcaacataaagcagagtacctcccgagactggacctgcttcaaaacatgtccaatgagatctgatctcattcgaaaaatgttcataaaagatatggagatcgcatcttgtacacatatttgtggcaaaagcagtagagctgtaggtgtttaacactgcctacgtgattgtagaagatgagaagacgggtcaagcagtagcagcaggaatctcattctgaagtaacggatttgttatttcctcagtgccgtctgttgaagcaatcaacacagcagcagtt

SEQ ID NO: 115933 - DNA, 849 bp, Physcomitrella patens
  Intron number 1 from transcript Pp1s101_116V6.2 (locus Pp1 s101_116V6) derived from phytozome v7.0 (chr-ID scaffold_1 01; pos 547011 to 547859 reverse strand)
cgcctccaccgagtcttcactctgcccatccctatgtgaggtttcctcctggtatttaaggaccctagcgtaaatttcttcggtcactcccttcacactcacaactcacagatcagagatatgtaccaagtttgaatcgaagcaccctgttcttctgttgagaagaaaccgcagactatagtctaggttagtggtgggttatcgcctgattgacgcagcgtctgtgtagtgagacgtttttgaactgctgtcttcggtttgttttgcatcattcggtagcgagtgttagatagtgcgtgtatttgaggaaatggtgtattggtttgcaagtggtatagttgtgagagccggcatgtttgagaggagagctatttgttaatctagtattagtatttttatgcaggagcgatctagttgtgtttcgtgggtcaatttttgtttgggcagctgcatttttagttacagctggtgaatttaacttctgagagtatacaacccggcgtgtggttttgaaattttgttatccaggataggatggtctagcataccagtttattgagaatatcttaaatccttacctagctggtttttcttgtgagaaacttgtgtcaccgtggccgttcacgtaagattaatccgtatctacagcttcggaaaactctcagcatttgtatgtcagcctctttttgacctaaacagtctgtgtgtgctattcccgtcgtttatttcgatttgaaacggtcttgtgatgatcatacgctcttatctttttttcacttaagttagtgatttgttctcaaaaggtggattgcagttggtggaggcaacttgaagatttgaggttgattg

SEQ ID NO: 115934 - DNA, 1021 bp, Physcomitrella patens
  Intron number 1 from transcript Pp1s197_11V6.2 (locus Pp1s 197_11V6) derived from phytozome v7.0 (chr-ID scaffold_197 ; pos 58390 to 59410 reverse strand)
ccataaccaaagttccagccaacccactctaacaggtcagattactgttgtttagcttcccttggtaggctaacttcgtgctgtatattcccggttccgttccttttctcccctccaacacatgcaatcggttgcgttgctggagttgtttggagcgctgtgtatcgacgtgagggatagttttgacgtgtttgattcggtgtaagaatttcggagctcgggtaggttttttgtatgcattaacgtgtaatagttggatgttgggtgtcttggacacgaggggattttgggtgtttgaatggaaggatatacttgtttgagagttgtcggtttagaaggagttaggggcggattcggagaagcagctgcagtgaaatcaatggagggttctacagggtgtgagacggatctggcaacgaggcagcgtaatgtagatggaaataggttgttgctcctggatggtggagttcatgaccttccttcggtctagtgattgcgatagaggatgggctgtggttgtttggaaccgatatcggtttatgtttaatcgggggtccaggttccttggggcgatctaatctggaagtggattgctttggaccattcacgaacccagaatggggtttttaatgagaattatgactcgaaaaaaaaatgaaaaccttcacactctgacatttgcttgaatcggagcttatggattacttcgttctttaaaattttcggactttatgagctctgtagtgaatagggtttcaactgtaaccttcacgtcaaagcgcccaagtattaatcctgattctcccttgatctagcgtagatatattttagccgaatatgccgttaaattttatcttgaagatttttgttctattttattttattttatttttcttacttgagttgtccttgtttatctgagtggaatataagtttcactgtgcgttctgtaacaactgggtgcctaaatcattggctattatggtgcagatttggtggcactaccaacgttccccttcac

SEQ ID NO: 115935 - DNA, 583 bp, Physcomitrella patens
  Intron number 1 from transcript Pp1s193_65V6.1 (locus Pp1s 193_65V6) derived from phytozome v7.0 (chr-ID scaffold_193 ; pos 696414 to 696996 reverse strand)
gcatccttcaggtactcgtgcctttttgtggactaaccctttcgcatcgcgtttcgtttgtgtctcggtgttttctttcaagctgtattcttttgtacctattttcggatgagcgttctatgatgccccaatccactggagacgttcaaatgttgattgcctcctttaattttacgacaacgagtatgtcgtaagcaatgtttttaatgcccgtcattgtggttatcactcggtaaatgcaagcatcaacttgttgatgctgtgcatggattcgaacgtgaagtatggacaatgttttgcttcttctgtcctcttttcgcgaggtgaagattgtgtagtagtagcatccttgcagtttgattgctttattttattttattttgaaaagtaatgctctgtggggtaaatattcgttgacgtagtggtctttgcgactgatacgattcggtctctccatgtcatgagcttggagccgattttctacattttggtgtgccgttggaacttggtaggctgtacttgtggggtctgaacttatttctgaacttcgtgagcactgtgtcttaggtggagccgacgtcgg

SEQ ID NO: 115936 - DNA, 921 bp, Physcomitrella patens
  Intron number 3 from transcript Pp1s28_48V6.1 (locus Pp1s2 8_48V6) derived from phytozome v7.0 (chr-ID scaffold_28; p os 334583 to 335503)
ggaaaagacacaagctctctctctctcgctttctcgtaagtgtttgaatttggttattcgttatgttacactctgctccacgcagtacctttttgtcaaatattaagaaaatcagtgaattcagcacagaaatactgaaccccaaatgggaccctcagtgtgtgtgtgtgtcaataatatgagtattccatagtgttaccgatcgaacgagtggtgggatccagagagatctccctccccagctttttggaaagggatttattatctttattggttctgctttgagtgttgttggggtccctacgaagtaccaacactctacctcgggtttattttgtgggggttgaatcgacagaaggctacaagttgcatcaactgcaggcacctttaagcacaacttctagttgcatcacaaggaaaaagattgatgttccttgtttcttcgctgccgaattcatatcagcggtaataagcttcattgacttgaaccgccagattaccacggcatttttctagattctaagtgatatctcatgtgaggcagaggttgatctggtgggaaaaaagagattccaaacggcagtacacgtgtttatggacaacgcatcctcgccttaaattttgctttattgcagggttgcagtcacagagagaggttactttagttctggtttcgagtaagcaagcttcttgctgtgtaaattattatcataagtcgtgcattaccagcattaccaggtcagccaaacagcaagtttcagtgctagtctcgggtggcacatgtttaaatcggagaagtgcaaattaaatttgtagatgtgagattctgcgacaccatcatgctctcatgacttcatattatccttcttgaggtatgtttgtggagggggattctgacaagacaggtatcaaacgtgcact

SEQ ID NO: 115937 - DNA, 748 bp, Physcomitrella patens
  Intron number 1 from transcript Pp1s141_8V6.1 (locus Pp1s1 41_8V6) derived from phytozome v7.0 (chr-ID scaffold_141; pos 71661 to 72408)
cagaccagctcccaccggtaagtatccctggttcgtcgtatacccaccttcggagtcatgtagggcatgcacttgttcgtcgctgggaagtatttaccttcctgaaggccttgtggttatcgaattgtggctgtatttttatttttatcgaagtttggagctggattttgatttgccgtttcggaggcgacttgaacggaatatccgagctctgaaagtctttactgggtttggggcaaattcttaggcaaggtttagtgctcgcgtttacattattgtctgtgctcactcaacttaccgccccattcaatcttacgttaggagtcttcgtctgatttcgagtattatttcagcttcgaggatgggtatgttgctttgcaatggtggcgaatgtgtgtcgccgttactctctgttatcgttacaaaattgaaatctgaagtttggtttgtttttggtctttttggtctttcggtgattgtaaacctcttacatgatcttgaaagcccaaattaaatttacgaaatccattcaatgtagtccactcgtcctagaatttattaagtacttgaagagactttttccttcaaatctccagcagacggagagtaatgtaagagttctcccattgtaaccacatgcagtgcagacacaagtgtactcgccttggccctttcctcacactcaatgccttggcatgtcaaatgaaaatttgccggaataacacattgttctgtaatgtagacggtc

SEQ ID NO: 115938 - DNA, 485 bp, Physcomitrella patens
  Intron number 1 from transcript Pp1s276_61V6.1 (locus Pp1s 276_61V6) derived from phytozome v7.0 (chr-ID scaffold_276 ; pos 308407 to 308891)
cctctcgccgatctgtgtgcctcgcaatatcccaggtgcatactctgccagtcaactgtaccagctctttttcttctttttttcctctctcaatctccccatatgtttgcgagttttttgtttagtgctagtgcccattacttttgtttactgttctccatcgatggtgttattattgatgcgctctgcgcgattgttaggtgcttggttctatggttgcagcttttttgtcttcggggctcacctccacgcagtttgagtttcagaggggttattttgtgattagagttacaagagttgtggtactgatttgacgacgttaatgaagggctatctttctgtgaagctgtgttaggtgatcttgatcggtatttttttgattatgacgtctgtttgtttcatgtagaggtgttatcagacaatacactctccggctgtcaatttttttattggttatttgtttctctttgtttctctgcagagaa

SEQ ID NO: 115939 - DNA, 597 bp, Physcomitrella patens
  Intron number 1 from transcript Pp1s115_201V6.1 (locus Pp1 s115_201V6) derived from phytozome v7.0 (chr-ID scaffold_1 15; pos 1172434 to 1173030)
gcgaggaaggattttgtcttcgtttttactctttcgtaagtgtcaaactgctggatctgagcttgaacttggattgcaaaaaattgtagagtgtgcgatttttgtcctcgccagtcaggctgatgatctgtaaattaggttcggggaatggtggatgcgtggttttgaagaagttgatgcattccaagtggaggattctgaatcgctgtggcaatccaaaatgtgtatttcttaggtaggggagtcttgtgtgatttgatttgttttactttgttttgcatatttggccgttgtcgatgtaaccctgggaaaggctagtagttataacatgtcttattttgacagcatagctcaaaaacagcaatcttatcgaatggcgcaagtttattgtttgtggctgtagcaaatcagcctggcatggacgcactaaggctactcttaacaatttctttttcccttcgctgtgaaggcatgtagtttctggatgcgggcgtaaattattttaagtgagaacagagattcaattacgtggagattaattacgatgtgtaaaatgatgcagctgatagcaatcgagtgagttcgtgtggtgcggcc

SEQ ID NO: 115940 - DNA, 544 bp, Physcomitrella patens
  Intron number 4 from transcript Pp1s60_319V6.1 (locus Pp1s 60_319V6) derived from phytozome v7.0 (chr-ID scaffold_60; pos 1846449 to 1846992)
cccgctactaccgctctttgtgccctggacattgggtacaatgaccgtccctccccatctctttctcctggtttcgcaacagatgcttcagaaacacaaccccagcgtccatgatctagaattccactcatggctcacactccggtatgagttccttccaactcgggacatcgccactgcaattctgactttcgttgctgctcagaatcaggagcagtttcatgttgggggcctctctccactccgattcagattgatttcttcatttcctcaatagtttccatatttatggtttgaacattatttgttgtctttcttattgctctttctttcattctttccctttctagttatccgttgagttatctctctttcactgtgtgtaaatttttcttaagtagtgcatagttgatgagaggcttaaattcttgattcaaatcaaaactcttgcattctaacaaagttgaaagcattctgttgacacaaaactaaagtagcatgctgttgacatttagacttatcttttgtaattgcagattgaaaa

SEQ ID NO: 115941 - DNA, 478 bp, Physcomitrella patens
  Intron number 1 from transcript Pp1s114_16V6.1 (locus Pp1s 114_16V6) derived from phytozome v7.0 (chr-ID scaffold_114 ; pos 124985 to 125462)
agttcacttaggtatgttgtcctcgaatctttgaattccacaagcaagttttctagttctcgctgctaattatgcatcaaactccactctaagatggagaaaaaacaaaaaataaaacaaaaaataaaaaaccagggcaattttagctacgaagaagatgtcacattctccagttcctttttctgctattacctgtaaaccgtgactcactccaaatagaaagatgaagaaacaggtacacaacagtactgcttctgcaaatcaggttctgcatgagtgcaagacttccacgaggccattgatatgtgtccggaatagttagatgaactgtaacacatcgacggtagtccacatctccttaaagaggatttccacgccatgttttcgtagaggcaggtggcgaaaaaatcgattaaagtatttttagaatatgaccaaagcttggtttcacagtttacaaaacaagaggagtttggcg

SEQ ID NO: 115942 - DNA, 811 bp, Physcomitrella patens
  Intron number 2 from transcript Pp1s93_96V6.1 (locus Pp1s9 3_96V6) derived from phytozome v7.0 (chr-ID scaffold_93; p os 981016 to 981826)
gagttacggtcaccttggggcgtggcgggaagcgggtatttttttttttttctcttactcttctgcatatttgctcttgctcagggaatggttccggactagaaggatggtagagaccaggttttagggtttagattgtttgttgtgtcagttctcttcccatgtgttggtattttgggttgtttggttttagtttcgttaattttctttttgtgaagagtttttgtttggtcttgttttctgttgggggtatgttgattttatttcctcgtttgatatcatcaagcgtactgcggaatattggaatcggtgtgctaattctctcaagtagcaggatttgctctattggtgagtggttctcaagtctgcatgtttggcagtacgcaactttccttcttctttacaatcggtgtaaataatgtcggtagaggtggactcacggtttttttaggaccttgagatatgcttttcaaaggttcaaatggagagctcatctgtatgtattttcatgcattaggtgtaaaggacagggttgggactgttgtgttatctcagatattctggtgttcgttttcctgaactgtgtctatgcggagagccacggaaagctgttcaggaagtagaaagcaaattttatttattttttatttataataattttgctgcttatgagagccattagattagtcatgctggttggtaatttggaatgtcaggaagaataagtttcattgtaatgcagttaaatgatattgtgcgcgttatgtatggtgcgaaacaggtggagagacacgtgactgttcctacagag

SEQ ID NO: 115943 - DNA, 983 bp, Physcomitrella patens
  Intron number 1 from transcript Pp1s21_18V6.1 (locus Pp1s2 1_18V6) derived from phytozome v7.0 (chr-ID scaffold_21; p os 109251 to 110233 reverse strand)
cgcgaaacggttgctgggagcgttcgtgagttcaggtaaggttgagtgcctgttagtttcagttaccaatgacttggggtgtgtgtgttgaggtttgggaggagggaattgcgtccggaattgatgttgattggtttggaaacgataaaaaagcaatgagaatatgtagggttgtttttgttaatattttcttaaaattgttgagttccttgtcattgtctgacatttacgcgtgtctctctgaagagcttagacacaggtcaagaagagaacgagacctctggaaacgtttcttgttcaattgctgctcttgacaggggcaccttagaaattggaccttaaatgttttttttttaatttattctctgttgtaacgttagtcattctcggatttggtaggaaatcgtatatttatcgggggttcaagcttcacacggctcgtatttagtattcatgagtgttgcgatctagaaatgtgaattcatgatgttagctttgatataatattacaaaaatacaggatttcaactgtgtcgcttagatttcataattagacataggcatatcagccgttttagggtacgagaatcacagaatttatttgaccaccgcaagcttcactggtaattgaacatgcacatagctttagagccagaaatatttctgaaaggaaaagttgacactactagcttcagattgctttcggattttaaggggcgtgaaggtgtacgtgccactactttttttaagttcaagcagtggtcaccactctctatatcttagattcgtgtccaatttctgagatatgttatgactctcgcctacgctcaaaatgattgttgggactgcaattttgtatatgttgtatggaggttgttaattatacgctcatccttgtggtcactttgtacatatcattcaatttataagtgccattggtgccaacagacgagggagaggttggagtacaacacttgtggaga

SEQ ID NO: 115944 - DNA, 291 bp, Physcomitrella patens
  Intron number 2 from transcript Pp1s33_273V6.1 (locus Pp1s 33_273V6) derived from phytozome v7.0 (chr-ID scaffold_33; pos 1620074 to 1620364 reverse strand)
ggcgtaagtcttgatttctctcttcctccactctgtttgtttttgcagacagagactgctcatgacatagaacgtcctttcaaggtattctcacgaagtctgtcaaggtcatagcagcactaatttagcgagcatatcctgtagatgcctagcatcttttctcaccaatgcatttgcatttgattctcgaggccacttattcaacctgatcagtggctgggtttctgcggatcttcttattggatacatgtcgcgtcgcccatgcagatcaacaagtataggggtgtttct

SEQ ID NO: 115945 - DNA, 538 bp, Physcomitrella patens
  Intron number 1 from transcript Pp1s33_273V6.1 (locus Pp1s 33_273V6) derived from phytozome v7.0 (chr-ID scaffold_33; pos 1620597 to 1621134 reverse strand)
caagtaagcggtggcggcacgcaaggccactggtgggttttatcgaagccaacttttgtatttagtcttcgtatttcatgtaatgggtttgtgggttgcagtgtagagaggctttgattttctgacactggagttgtttgtttagcaattattgtgggactcgttaggtttgggagttgcaagcttttcagcgcttggactgcggtgactcagctgtaggggtcttctgctgtgggcttcgttgctagacttttagtttttttctcgcttctgtgggatttcgggggaggatgaaggaagaatcgtggagtattgggatttcttttggttaggtgcagtttttggaggttgtttgagatgggtttgtctttataccgaagtgtgttgaagagaagagggtttaatgtttggactgtgtgtgtatcctacagcagtcctcttagttcattgctgtttccagggagatgagttgtgctttgggtttcgaaattgtgtctaggcaggtgggaaggtggattaagctaaggaagttaggagt

SEQ ID NO: 115946 - DNA, 925 bp, Physcomitrella patens
  Intron number 1 from transcript Pp1s171_139V6.1 (locus Pp1 s171_139V6) derived from phytozome v7.0 (chr-ID scaffold_1 71; pos 790725 to 791649)
tttttttctcctctcaaccgagcccctgtaagattgcaatactgccactgtcgctctttgacattagatctgcaagcttttacgatacatgtgccttgtgacaataacgttgggagcacatgctttgatatctgaggaatgccaaattagatctgatttcagtggaaccacgcaaaccttggactgttcttcagactattattgagtagggtttggactgacgaagacaatcttttcgtctcaggagacagacaagtttgctggatctagtgtgtaggaatccaggtgtgaaggtgtttcagagatcctcttctgggagtttcagagatcgtcctatgcgcacgaattagcttgagttagttgttgggtgcgctggctcgacggccgagtatgtgggtgaaagagaaagattggtattactgattagaacgccggtggttgtcatgagggatatctagcaagcgagcaatccttttgtgggcccctcgagtgcgtggtattttgagtcgttgttggattagattgtctatacgcttttgttcctcgagactcaattttctgtaaaaaatgaaagcaactgaaatccaaacctttagcattgtttgggtttcacataacgtgaggcgagatcgaaaaatagcagtcgcattcccgatctcttgtatttgtccgtatgcttttgtttctcttgaaaatgtggatcaagtgtcatttacttacattctgtggcttatgtgtaagagttgcaatggcttctgatgttcatgatgcacaaaattcatttttttttctctttgcttacagtaactatcaggagtcctttgagttcattccagtgctctttcgagattgctcgagttccacctccgacttagacctagattgtttttggtggaatttatcaggacgtggcgactatttttaa

SEQ ID NO: 115947 - DNA, 514 bp, Physcomitrella patens
  Intron number 3 from transcript Pp1s66_41V6.1 (locus Pp1s6 6_41V6) derived from phytozome v7.0 (chr-ID scaffold_66; p os 162534 to 163047)
aattaactggtgagtcatattatacattccaggtttgaatcttactggactgtaccattgtgtttttctgaatcacaccattattttacagttagtatcaaagcattgaactcttcacagtatgtgagataccttgataaggttattcctatttacagtgtatacccaacatccaagacaactaaatcatgttattgataacagaccagcttgaatttctttgttctgttcggatcttcagtacttaaatctcatgttgaacggatatatcttgatcagtgtctttagccctaacatgcacaaactgtggatatcttgggtatgtttgctcacgtatcacttcactgtttgctcggtcctatagatgccgtgacaataatcatacagatccaccacaatttaatcaggttctcttatgtcttaattggcgcagaaaattccgtaacatgtcaaggtatacacttgggtaaactgattgcccttcaaataatatctcatgtactgggaacaggta

SEQ ID NO: 115948 - DNA, 1004 bp, Physcomitrella patens
  Intron number 1 from transcript Pp1s26_79V6.1 (locus Pp1s2 6_79V6) derived from phytozome v7.0 (chr-ID scaffold_26; p os 694666 to 695669 reverse strand)
tcaattcaaacgaagcaagttgcggtatgttcagtttcagaactagtatttgattgtgcaaggaaagtgttttcttaaaagaaatggacttccataaccaccagtccttgcattcatgcacatagtttatttttctctttatttatgagaataatctgtgcactctgtacggtttttatcaaggcgaagatccatgtggttgcagtttaatcacggtgcagaaatcgcagtaccgacgaggttgcagtctgcatggcgcaatgtaataccgaattgttgttcatccgttgaggattttgtgcggaagacaggcgaactgtctggacttgcaacgtttcacagaacatgggtcgaaatttttccttcaacaatgtcgtgcagagtcacgatgcgatagttctgatatgagtacccaatttgtacagaatgcaatgatcgttaccacatgttgatgccaactaagttacaacttcttcaacagttaccagctacttccatgtatcaaggtgctgagtgcatcaatagctcatctgcatcagtatcatagagtgtttgcagatcaaagcatcctaccaccacatgggaatcccacgattgggggaggaattaccaagacttaaatgatagtactttgaagccagctacactagtgagtctcacgcaactgcccacagctttcatgctaactcctcacgacagccttttaagttttaagctacagcgaatcctgctttattcgactgacggtgttttccgcgtactgatcggaagatatgtaaccaagctctgcagatccaagacatgtcgatatgttcgatatcctcgacttgtttctatttgggaccaccagaacaaaggtcacaggattgtgtaaaaactggacacaagatctacaatccagtccttgcactatttgcagcatcaaggtacacaaaccgttagtcgaggagaaattccctgaatttataacaacaaacataggccatccaaagggcatcgttggc

SEQ ID NO: 115949 - DNA, 655 bp, Physcomitrella patens
  Intron number 1 from transcript Pp1s66_141V6.3 (locus Pp1s 66_141V6) derived from phytozome v7.0 (chr-ID scaffold_66; pos 620122 to 620776 reverse strand)
gaattctcattccgtggtcgctcttgctgcatccggtttgcttctactctcctgatataatgtcatggttcatttcatttttgagagacggagaatgtggaagttgggttctggttgaggtggaggaattgggcctgtctacattgaatttagctgccaatttttaacttcgaaatttttctagtctgcatttagtgtagtgcagatacttgctttctgacttctttcggatcgggtatttgttcgggcctctggtagcgtggttccggtttctactagggaacggtagcctgatggtcatggttcagtttggataccatgtgcttaatgtggatgggatatctcactatgtcagcatcattggaatgggttttgattgagaccccttagttcaagtaaagtgtatggctcgcgaatctataagtattgtcacagcaggaataggtatgactgaaacttcaaactgtttggtagctgtttcatctctatggcgtcagttgttctgctcccgaggttcacaagtggcaggcttattacgtgatcgggacatgaatttcatatgatgtatctataaagtaggtctacttcatttgttgggatcgacacaatgcaattattctcaagtgtgaagaaacctgtggtaaggtaggaagca

SEQ ID NO: 115950 - DNA, 1001 bp, Physcomitrella patens
  Intron number 2 from transcript Pp1s312_75V6.1 (locus Pp1s 312_75V6) derived from phytozome v7.0 (chr-ID scaffold_312 ; pos 459906 to 460906 reverse strand)
tctcctgattttcttgtgtagggagctcatacggggtatgtctccatgctctgtacttcttagtacgtgtattagatttcacatgttttggtgtaatacttagctcttgaaggtaacttattatatcattctgttctcctcgtggaaattccgcacgtagaatgggtgtgataacggagcttacacagtgttagatggttgtgtatcccattgagcggtaaggagtaggaacagccgttctggatgactaaattacacggttgatggcgaacagttggacctcctcaaacgaccgaggcctagcgctgcaaactgacagtttctcaatagtgctaaaactgtatgaatagctttaaaacttgtgggcaattttataattaaaccaggattaggtaccgagattggactaaaaactctagttctttcacaatagctgacatctgccaacacaacgaaaactgttactcaaacgtacccagtcgagtcagaaattatactggctgtaagagaataggtcgagtgatttactcaaatttccttcagtgtgtggtttgatattacaatagaccctccgagtctaccacatgtggagtgactacaaaagattattgcagatttcacattttttttgccagcggttccaattggaataatttgctacgactatacatccgaagactcggttggagagtgataggataattcatgaaagcgacaaggcttatcctaagtgaatcagtcaaggtcccgtgtagaatgtttcggaagctaatcttgcgtggtcagcaattgatgtagacgatggcagcaacagctactgtgctgcttattgggcaaatacgcactttcaggtctctagtacatattgatgaagtactggaacactcctgaagtgcttcaaacatatgaggaagcatacttggattccaggacttagatgaattttttgaatcatcctttttccaggaatcaccgcaagatttttctattgttggggtgac

SEQ ID NO: 115951 - DNA, 616 bp, Physcomitrella patens
  Intron number 1 from transcript Pp1s567_2V6.1 (locus Pp1s5 67_2V6) derived from phytozome v7.0 (chr-ID scaffold_567; pos 6786 to 7401)
gaccataagagtcctattgtgaagcagaaggtatgtcggtcgagctcaattgacagccatggaagaactttgatttgaagagggtgttcttactgtatttgccttgatcggtttgggtggttaggggggttagagattgtgattgtgagggtgtgtttttttagaggtttttattgaccacaccaaggaagcatgagagaatttgtcacgtcgtagacgtaacaatgatattgaacaacctcgtaggtcgtgagtgtttgtcttttagattcactgagttttactgtcatggagttttgatggttttcctttacgcatcttttgatgcgtgtaatgctgcgattgattgccatgcgatcaatttgattgtggaacactcttttgggatctgggcatagacagaaggtaatcagttggctgattgcaccaatggatgattatggtggttcacatgtcactggtcgactagatttattgttctaaacaggtcagatcgaaacttactcaagtttctcgtaatcgagacaaaatttcagtcatttgaatccctacttatcatcatcttgacacggaaaatgcaggcattgagacttataaaatttgctgctggaaaggc

SEQ ID NO: 115952 - DNA, 901 bp, Physcomitrella patens
  Intron number 2 from transcript Pp1s370_25V6.1 (locus Pp1s 370_25V6) derived from phytozome v7.0 (chr-ID scaffold_370 ; pos 153172 to 154072)
ggcggcatcttgcgacacaatttgcattgcattgggtgagtgaggggaagtgggtgtcttttctttctcccgtgtttgtactttgttccttcaaagtgtgtagtgcttttgtgatgtgcatggactagacataatttgaacattgatttcatttaacaaactcatgcacattgtttgcaaagcttcggaaagcacttcaggaggagtgtgtgttccatgaccatgcaccgcatatgctaaaacaaaaacaaggaagtgggtgcagggaggaggggaataatctcaacagttaggaattttcctttcaaattgattgctttacaaagaatagacttggtcaagaagaacatgcttgtcactcccctgaactacacaatcttgtgaactctcaatcaatttcaatgttatactagttgttttctattcttctcttcctctcttgtgaaaatcttgggcaagcattgttgaattacatttgagtgttgttttgtttcttgatgcctttggcagagaaagacaaattttgaaggtcgcatagcttttagttctcacattagcgcttgttattgagttaagaagcgatcacaagctcagcaatagcaaggtgttggaatgcctattattctttgcacatatgttgagctcatctcacttccatctttctccatctgttctgaaagcagtaattaaaaacccggagatcaatggagccaatggtgcagtcaggagccttaatcttatcccaaattgcttgccgattacttcttcgtcaattaaactgggttttgtgtccaaagaatagacgagtgtccattgctactaatttgattacatgattcgaatatctttcaaaacaatttttgaaggtcaactctagaatcttgtatcaattctgcaacgc

SEQ ID NO: 115953 - DNA, 831 bp, Physcomitrella patens
  Intron number 1 from transcript Pp1s6_31V6.1 (locus Pp1s6_ 31V6) derived from phytozome v7.0 (chr-ID scaffold_6; pos 307510 to 308340 reverse strand)
caaggctgcattcatcacaaggtaaaattttgaggattgctcttccaatttaatgctggagtggtattatttacaaccccccactctatgtttttcctcattttctcattttcctttccaactggtttctgtgcttgtaaacaccctggcttgaggacctcatcttgctttatgtctcacttgatgtgtgcatttgcagcaacatttctgtgacagtgaacaggatttttgtcttcttctctctatcttcatgagtgacatatctagaaaagtatgaatgaatcctccactcatggatgagcagccagttttggatctgcctatcagaccaagtacaaaggacatcattttgaaattcagtaggttgtctttgtgtctatgtgggtatattatcagcaataaaaacattgatttttcttactaatttgaaagagtttctttataaatctgaaacatatgccatggtggaaatataaatcttgtcaaatatctgggattttgtaaataaatcagaaatgttgttttcggagaaaaatattatttggtgaattctagaatctattgtatttatttatttatttatgtttgtttgtttgtttttttgttttgttttgttttgtttttttttttttgtcttgatttttctaaaacatctaagaatgattatctccacattaacaaatatcacagcaaggatttgaacttccaacccctctataccaaccaagaatatttcttggtatcacgttgcttattctgaccaatgccacatcagatcggctagcattagtacattaatagcaatgacgtggtttggacacaacagtcaac

SEQ ID NO: 115954 - DNA, 791 bp, Physcomitrella patens
  Intron number 1 from transcript Pp1s506_4V6.1 (locus Pp1s5 06_4V6) derived from phytozome v7.0 (chr-ID scaffold_506; pos 21880 to 22670 reverse strand)
ctagctgttctccccccctccctgcttgttttcaggttcgtctcttcccactttgtcccacctctcattctcttcttttctgaaatgtttctacatcaaactcctagcctgtttgctcattcactggacttcgtggggctgcggcgcggacaatcttcgttctctgctactttgtattgtgtgaggcagatttacgcccttcgcacacaatatattttagacttgaatggcgctggcaattgtaggtgccatccagtgcaacgccaggttgagaattgcatttcgttgcaattttgagtgaggtgtggcctattgcagtcttgggacgcgtgtttgcccatgattttgcactctattggagcgatttagtgggaaagtttgtcctgaagagttcgatgcatctggtgtgcagtgtctttgatcggtcgcaggtaggcgaatgttcatggaggtataattaatgtgaagaagtaagatcgtgataaaaaaaaagatataaactttttgacacgtaccatgctgatttgaatagctgtacgcgagtatttaatttcatttctgcttctcacctgccttgctgatttgcgggtttgagatttttattctatatttttattatataatgacttctggatttattcaagaagtccttggcaaacagaataatgaatactgttttgtagaagcgtgagtgtagagcttttgtgaaaatggttcgacattagaagtagttatacaatttttgtttattcgagatgactttgactgttgagagcgatctgtgcagggtg

SEQ ID NO: 115955 - DNA, 772 bp, Physcomitrella patens
  Intron number 1 from transcript Pp1s24_125V6.1 (locus Pp1s 24_125V6) derived from phytozome v7.0 (chr-ID scaffold_24; pos 1414337 to 1415108)
gtaacctggtaagtgcaaatagcgacgaggagcttctgagtctcctccaacgagctaaaatctccaagcaacctgtgagtcgatcaggcctgttgtatctgaatcttcttatgccctttttctttctgtgccactacgtcaagtttatgtgggttgatccaatgtcttggatgtagcgccttgcgacagttctttagaaagcagcaatttcacgattttagttttcaggaattcagtaacgagtaggtccggtattatttaactttttttttttttttttttttttttctcataccctacttttgcttaccagattctgtcgatcagagacgccttagaatcacttaatttgttgttaacccttgaaccctcagtgctcctttcttattccgttgggctgaatcgtacattttgattcttcggaggtctgcttgtccatcttagttttagcgttttcattttacgctcatagaccacattcggggttttgacctaatcggcaattcatttacgggggtggctcgtgcatattcaaatggttgaaaatttatttacattttggttcttaaatcttcttctccgaatccccaatttggttttgtggtgttatttacactccaaggggtcagtacaatgcactacgactgtaacaatggcggtttgaatgaaactaatttgttattcccaattaggttcagaaattatgtaacattcttttccaatttcttaactaacgttgttatttgggtgcttttgcaggccgtagtcaact

SEQ ID NO: 115956 - DNA, 561 bp, Physcomitrella patens
  Intron number 1 from transcript Pp1s30_44V6.1 (locus Pp1s3 0_44V6) derived from phytozome v7.0 (chr-ID scaffold_30; p os 342499 to 343059)
cacaagaacaaggtcatcaaccctcccaagttgaggtaagtcctgtaaggttttgggttttcattttgttcgtgctgttagttattttctgtcagtgttaaggtttggaggaccgcagtctaagaatttggttaaacgccgaccctcagggcttttcattggggttttgggttctggaaggaagtcagtgtcttttttcggatatgcgatcacattatagttatatttattgattccagatttccacgagggtttgagttggtgtatcattaagttgagttagtgtatcactgaggggagttcagtttcatgtcattcactcggatgtagctaagaccgagctgaatgaggatggggatgcttgtctcagtaatcagggtggggagtcaagttctcttacctgcagattgaaaacaagatgcatagcagtgttcttcttttactacgggcgatgagagtacataaggtgacttttttccacattgtgtacgttaatttgagattcatttcttgtttggatgtgcaggtcaagcatcactccagggaccgttctgattttgt

SEQ ID NO: 115957 - DNA, 1054 bp, Physcomitrella patens
  Intron number 1 from transcript Pp1s5_75V6.1 (locus Pp1s5_ 75V6) derived from phytozome v7.0 (chr-ID scaffold_5; pos 443559 to 444612)
acgacgccctgctgccccctcggcccagcgcgcaggtatcccattccatccttctccactcgacacctaacctccgtagcttccaggtcgccctttgcgtgactgcagtgctgttctgcgagggtttttatctctttctgcccttaatttattatattctcggcttggcgccacgatctttgggagccctcgttttcatgcagtcgaatgcgggataaaccgcaattctgtaggtgcagtcggtgcggctttgtgcggcttttcgcggttggacgggacggaagctggttaagtgtctgtatattgaagcggtggatcttaaaccctaggttggcggtgggttttttgttgccgtttcttagaggttctcgagagcattttcgcgaagcggcgagtatgatttgaggatgagcggttttgtttctggattgagggttctgtcgcgttcttgctgaagcgaacctcaattgaacactcgtgggagagggtgtcgtcgttaatcctggccttcagaatgatggagtgttgtaagctgcgtgatgaagttgttataggggggtagagtgaagaggtcgtagagcaggtttacgctgaccagcggtgggctaggaaggaagtggttgctgaaatttgaggagccgtggtgatgtcgctggaggaagggagggccgaggtaggggggggtttgagtgagggcgagggagagttgttgcatcatctttgctgcagttcgtaggagtgttgtcgtcagatgttcttgccatttgtttgccgcctttaggtccgcgacggtgtcaagaattcggtgctgagatcgcaggatgtagcgcatggtagcattgcgttgaggtcacgggttacaagggcctcacaccgctggaactcatttttgagctctgtcgaatcttgtgcatgcgtgcgtagcaaccgagctgtgcatgtcagcgtttatgtgtggagaattagttttgtcggtgccggattcgttagcatgacgacttttctgacatgaactgtggatttgtgtgtaggtgtgagcgattggaagtcggag

SEQ ID NO: 115958 - DNA, 557 bp, Physcomitrella patens
  Intron number 2 from transcript Pp1s162_62V6.1 (locus Pp1s 162_62V6) derived from phytozome v7.0 (chr-ID scaffold_162 ; pos 301289 to 301845)
cttacaaggagtgcaagaagcaagaggtaacggttatgttcaattttcttcgcgaacacttcaagtagtgattatttgtgtgtgtgtgtgtatcaactctgagaggtctatcttccggtgaaacgtatcaccacaattatcattttatagctgttgttaaaaccatgtcacatgttgaatagaatgcctcaaattacgaggtcgagggattaagctgtttttttttgtgtatgtcgtatattcctttgagaagttttaactattatttgcttgtgaaaaatgcgctttctaaagttacccatgttttgctttcgtcatgagtggagagtgcaatgaaaacaaaaaaaactcctgctaaagtttcaatttacgggtgtgagacatttaggcgtacattgtacatttctatcaagttctcttttcatctgtagtgaacgggtagaagtagctccttgtctgtttgcatatttctcgatataccccacattcttcatcgcatcactgactttttcaatgctgcagagggaactacgccttgaagccaatcgaaaatccaa

SEQ ID NO: 115959 - DNA, 593 bp, Physcomitrella patens
  Intron number 1 from transcript Pp1s131_4V6.1 (locus Pp1s1 31_4V6) derived from phytozome v7.0 (chr-ID scaffold_131; pos 30488 to 31080)
cgtcgcgcgcttcgactgccattctccccttgcaggtcagtaaatttctgccgcaatgccgctgtagattcacttggctctttgaatgatttgcttttacggtgatttttttgtgtttggattccgtagcgagcgtttctgggtacctgggcagtagttttacttgattaccgagggaatgagtgggtaactgtttgattcattgcgaggttgtgcttgcgccgaagagcatttcttggtgtgatcatctgcgtgcccctcgttcgggattgggttgtgcttttccagcaaatgttgctagtttctttctaggataagaaccaattttgtggttggtttcttgatgcaaacttctgtgcgtgtctctaatgtagcagaagccctcgcatttggtgacaccgatttagatggtcatttttatccatctcaaatcccgccctgaggttgtggttatctcattgaattgcgagggcaggtggtccattcccctcctaaaatgcgattttgctaaagacactgttagtcagattcaaccattccttttaatgctgttgcgattcccttgagcagttaggagctgggcagcttaacct

SEQ ID NO: 115960 - DNA, 475 bp, Physcomitrella patens
  Intron number 1 from transcript Pp1s7_15V6.1 (locus Pp1s7_ 15V6) derived from phytozome v7.0 (chr-ID scaffold_7; pos 70030 to 70504 reverse strand)
cgaaacgtggcatcacgcagctcttccctattcaggtttgtgtcaccgtatgcccgaaatgtcgaggaggaatgatgtcaaagggataattggcatagtacacttgtggtcgtcaactgtttgtaggtttttcttctctattgaagggttctgctgagcagtatggtcttggtcctttcgcagcaatactacttcgagaattccgcttttgcatgatgatagggtttatttcacttgttaacagagtgaacgttattaattttttttgaattgtatcttaatggattaattgccagaatttctcaattgcagctctgacaggctttagaaaatatggctaacttttataattgtcatattccagttagtgcactgaatttcaaatttaactttgaaaacgcagtgacacgggcattctacataatttgagtttcgtgggtggtggttatcgcagagggcagtacttgagccagct

SEQ ID NO: 115961 - DNA, 756 bp, Physcomitrella patens
  Intron number 1 from transcript Pp1s28_247V6.1 (locus Pp1s 28_247V6) derived from phytozome v7.0 (chr-ID scaffold_28; pos 1508209 to 1508964)
tgctgtctacttggcaaaacgcgaaagggatttgggtgagtactgagtgttgattcacaactgaagttgcacatggaatggaaggctcaaggtggtgatggtgacgcagtttgtgtttttcgttttccagtgaagtgggtagtcgtggttgttgaggtgagttgtagagttggttggggttggtgcgctaagtgttttgccttttttcatacacactcccctagccgtgtgttgtcggttttccgttttgcagtccttgcgtttcttaggaatagctcaattctaatgaatgattagtaagctcgcagtacgagttgaagaattcaaaaccgcggtctccattttttttttctttctttctttctttttcttgtttcccttaatttcttctttttttctttctttctaccaccccttctctgttttatttctctcttctttcttcgcatcggaatactctaccatctggtggcaaagactcccggtgttcaagcagctagtttctgaaacaaaccttctgttcgagtcttcactggcatcagaattttcttaccaatcctttattagcagctattttctattaaatcctattgcgaatgtctttccacaaaccctcgaacattaaccatctcctgaacttggattgagctttcccctcttcgaattttatctgattcatctcgttaatgtctgcattgcttttagactgccactaatctatgtctgtgtatgcaggcgtaaacaattgtcaagtta

SEQ ID NO: 115962 - DNA, 742 bp, Physcomitrella patens
  Intron number 1 from transcript Pp1s9_239V6.1 (locus Pp1s9 _239V6) derived from phytozome v7.0 (chr-ID scaffold_9; po s 1707379 to 1708120)
gaatcggcgttcaagctggagatattctgccgaaggtgtgtgttatataattgcgatgtattggtattctcgcatgtgatggatggagttaagcctcgtctcctgatacgtagggaatttgagtctatgtgtcgtctgacgagtttctgtgtgtctcattggcctagtcggtttcttagagatggtttttttgcgtcttcaattgtcaatttgttccgatctttaatcctcactttctatgtcttcagtcatttacttggttttaaatcttttcatgctcgaaaaggaggattctagcggtgctgcttgagtcactcttacaacctgaattatatatatatatatatatatatttttgtatcagaaacgaaaggcaatggtagagagtggcgggttagaaattcaatccacagggaggagtcatctactcagcatctgcataatgcaccccgaggtgacgcacaacgtttctcgtcatatccagctgtttttctttctatgctgataattcataacctagcaaatatcttttaccaactcacagtgtcatcaagcctaacaatgctatctagaaatttggttttgttgtaggtgatgaaccattgcatccttaaggtttcctgtaggtatccttatttcatattctctttagatagctttgcttttccaggttttgagacaatattaagaagcctttaatcaacttgatcgcatctgtagaggaagggcgaggagccacaag

SEQ ID NO: 115963 - DNA, 500 bp, Physcomitrella patens
  Intron number 2 from transcript Pp1s162_75V6.1 (locus Pp1s 162_75V6) derived from phytozome v7.0 (chr-ID scaffold_162 ; pos 384774 to 385273 reverse strand)
ggattctggccaacatcgtcactctatcatctattgtaagttacaccaagtgaaatccatttagagctgagtagatcaatgcttgtttttggaagaatatagaaacaattttgttttccttgtgtgttgttgctctcgaactggcaattgatgcgaggagcgtgtggagtagcaatgtaagttaggcatctttagcttcacgcatatttgagggactttgattctttctaatatttcagtgtttttaagttttggtatttaatgcagaagtgactcgtaggagattcggtagtgctactgaaacgatcaatagtgtagttaggttgagggtttagggttcagatattatttcatcaatgtgaatatttatgaatcgtcacgagtacctaaaagttacgtttatgacgtttgtgcacatgacttcgctgaagctttttgggctgtttgtattgagattttttgaagccatcggcgaaagtgaaggtactggtggagtatat

SEQ ID NO: 115964 - DNA, 353 bp, Physcomitrella patens
  Intron number 1 from transcript Pp1s114_61V6.1 (locus Pp1s 114_61V6) derived from phytozome v7.0 (chr-ID scaffold_114 ; pos 365583 to 365935 reverse strand)
tgtaagtgatcttgcttcaatttttgagctttaatgaagtatagtcagacaataataaagccttgatagcaagccattaaaagcaattggtacaataggataagccttttgcgctgctcttcaagaagagctggtatacttttacagattgatggcagttattgaggatcaaattcatcatcctatttccgtcatggtgaaacatgactccttgaactctattaataaccattagtctttgaaaagattggtggtgtggtcagtcatggtgaaacatgactccttgaactctgttaaaaaccatttgtttttgaaaagattggtggtgtggcttaacaaactgttagtcaaaa

SEQ ID NO: 115965 - DNA, 265 bp, Physcomitrella patens
  Intron number 3 from transcript Pp1s210_40V6.1 (locus Pp1s 210_40V6) derived from phytozome v7.0 (chr-ID scaffold_210 ; pos 264054 to 264318)
agataatacacaatcctactgttaaccaggttggaatgtgttatttggcgctggatggagtatgattgttgacttcgagagaagagatttttagtcgcccaaaacatgtggctctcttctatgatgccacagcatttgcaattcagctcagaatggaaacaccgtggtgcagaagcttgcacgtttgttttcaaaccatatttctacttttgggtggtacgcttactaatccaggtgaataatctttgattgctgcgagcagagg

SEQ ID NO: 115966 - DNA, 835 bp, Physcomitrella patens
  Intron number 1 from transcript Pp1s93_81V6.1 (locus Pp1s9 3_81V6) derived from phytozome v7.0 (chr-ID scaffold_93; p os 850489 to 851323 reverse strand)
ttagtgtttctagcggcggttggttcttttgtgaggtaagttgaattgtgcttccggcccatagttggtgcgacctcccaagctgttgttcggaaacagcatattacagatctttaaatacttgccaatatctgtttgagaagcataaatttcccaagctagttatcagcgtgagtaaccaatgcttggggataaaatttagatgccgtgcaatgtgatttggacttgtacgcctagcaggaaaccaggttggatatgtgtttctactgtagagtcagaagcagtttgccatatattgtcactgagttagttctttccatggtagaatggtttgtataaagccgagtttattacaggtcaatacttgtagtatttaacatctctactgtaagcaccaatttaatccaaatcgataccaaaatattttattatattgagtcggattatcgtcgagtgaatgatcgtttcttcttttttttcttttttggcattaagatgttgagggctttgtgcacattttggtcatgatcaaccttctgcataaaacacttgctggagctaatctgaagtctttgcagccttgggcttgctctaaggaaaaaagttataaagtcctgcataggttttgatcataacgcgctgtcccttaggtttcttgtcgaatgcttgtgtgaagttcggtttctacctacgatataatcgacgattcattgttgttctgacatactctcttgtgtgtttacaaccatcattctgcagctgagattatgttaagtgcgagtgattgtcctgtaacagtcgataattgggtgttgtttgattttatccagaaacc

SEQ ID NO: 115967 - DNA, 1014 bp, Physcomitrella patens
  Intron number 1 from transcript Pp1s12_262V6.1 (locus Pp1s 12_262V6) derived from phytozome v7.0 (chr-ID scaffold_12; pos 1573244 to 1574257 reverse strand)
gaggtcagcgactgctcggtacagccaataatttgtttatggaatggtctctatgttactcctcactctctttcatttgacgaattgtacctatttgtctttgttgggggtttagtttgctttctttgaagaatgagagaaataggagaaacaactgaagagtgattctttcttttgtgtgcaatcgagttgctgaaggctatctaagcactcgtgtttgcggcaataacgtagtagttcatacatcgcttattttttacatttttctctgtggactaacttgccatatcctttgttttttatttggactttcaacttttcgaacatgtttgctgtgtgcagagtggagtttgaacgtggatcggtctttataggataatggcggaatttttaaaagcatctagtacgacccgttcgctttatattacaacatacaggaagcgaagaattcctttacctttttccctttgtagaacctttcatagaagccgttcagtaaattctttggacttaaaaagcttccacagatattcagatcgaagatttccaagaatcgttcgaagatgcacaagctacacaactcaactaccccctatgtcatccactaggtccgaagaatggctcgcagctgcaaccatgccgtctcattcgtcatcaaacttaaaatccttgcctacagaacatttgagcgattcatcagctcaatggttgctatcgagagagtcaacattgtctgctatggctcataccctgctgaattctctgttagaaccaaagattagatgaagagaattattttcatttgattggttataagtttcataaagtgaatacatattcattgaatggtggaatgtgaatgtggggtatttggactagggtgttctcaggagcagacagtgatgatgttcgcttagttgttcagcatgttgttcgcgagcggccagtgtcaacgctaatgggcgttggctggggctagggtgccaacttgttgaccaagtatctgggtgaaga

SEQ ID NO: 115968 - DNA, 882 bp, Physcomitrella patens
  Intron number 1 from transcript Pp1s20_64V6.1 (locus Pp1s2 0_64V6) derived from phytozome v7.0 (chr-ID scaffold_20; p os 345603 to 346484)
ggactcaggtgtgttgccaattcgttggcaatccgtgtactgcaatcacatggatttgagttctgtgatggatggggagtcaggagcataccctttttcttttctttttttttgtcttttgttgtgtttttgttttgtgttggtgggttttgatttgggtggggagatcaaacgtgtagtgtgtttcatggaatgaagggcgagtgggtggttggagagtcgggataggtgtggttgtgaagggtgaaggaatttggtgagtttgcttgtattggatgagtgtctgaggctctggttagggtcgatgagtactacgcgtgctgaggcggatgttctgcactcctattcagtgctgcatgtctgctgtattgattcagctacatgggtatgcgagtattattatgaaaagcggtgggagtaatgtcgaagctggattgtcaatagcaaggtggctccagcgtctgtttgcgaattgtagatatagtgtgatcgtggatgtttgtagagtaagttaacggacttcaattgtagaaagtaatctctgatattgagaaatgtagtgtttgctctcttaacgaatctaggtcagaatcttcgtcctaaagggacagtagcgaagttgattggtcgagttctgtcgctggaagatcgtttgcaagcactgtagctaactgctagttaagagagtcagctgtcaagactgtaatgaagactgtctcgtccgtagtggattatttacattttctcttttttgtggacagtgtatttgcttagcacaacaatgatgtaaggacactaactagtttttagccagtctgactaggggtgtggatgtatggttgggcagcagaacaagattcaccccttttgtgacttcaatcc

SEQ ID NO: 115969 - DNA, 923 bp, Physcomitrella patens
  Intron number 1 from transcript Pp1s106_183V6.1 (locus Pp1 s106_183V6) derived from phytozome v7.0 (chr-ID scaffold_1 06; pos 1073785 to 1074707 reverse strand)
cttcctcgcgtcgcacgtccggctcgctcgcccaggtgcgttcattcccccccttcgttttcttctagcctccatcgccgcactctcgttgcagtcccccgcccccttcccctctttcttgtgagcctcaattcggagtcttttttttttttcgtctgacttaggagttgattgtgtgtgttttttttatcgagtgtgatttgcatgggtgttcgtggtagagcgcgctgatacaagggctggggttagttgtgtcttgcgaggtggctagcctttatggcgtttcttattggttgttttttttcgagagggtcagtgggcttggtatagtggaccaggttgtggtcatgagtgtggtttatgtgcttcttagtgtttcgtagctggttttctttatgtgcgggttgaagtgggggcttcggggtgtctggcgtgcgttgttttaggtcgtggtgcttcctgggttggatatgcgtgcgtcgtgtgctcgtggttgtggtcatgactccatgcaggcgaattcgcaaaatcgccagcttgattgtaggcctgtttgggagtggtcgtatcctggtcttcggggtttggttgcggcattctgttttgattttgtgtgtgctagtttctcgacgggcattgtggagcaagaattgattggagaaattgaagtttgttgcttgatcgcgatcagtgcatcagtttggaagcatagcgcagaaatagtgtttgacttcattagaatattgcacaaataattcgtgttctcaagcgatgttgcgcagacaaggtcgtaactctcgcaacaatctcgtatgttctgaagaggcttgttgatgaggatctgcgatgtgtggcgaggctgagattgtgcatggggtggcaatgcaggtgttgcacaagagataattggggggaattgtcgg

SEQ ID NO: 115970 - DNA, 646 bp, Physcomitrella patens
  Intron number 1 from transcript Pp1s36_261V6.4 (locus Pp1s 36_261V6) derived from phytozome v7.0 (chr-ID scaffold_36; pos 1725846 to 1726491)
tccctacgaggagcaggaggagaagaatccattctgtaggtagccctgtctgtctgtgtgtctgtccacttctggggggcgctggcgttgatcttaattcccattcttgttcgctgattggctgtgcacccgcttttttctgggttccgtctgattggcactgctgcttcttcatagagctcgtgggaatcgtcgtcgtatgcctttgtgtaacctctttgtgttaagagaattggggttggtgttgttgctcattaagagtttgtctgaatcctgtgagtctttgttttgttctgaattatgtatgtatatatgtatacagatatgtttgttgttgttgtttttttgttttgctttatccttgcgattgcagtggtgattcccactttggttgggttgaggaaatgtttgaagggtcagggaatttggcttcgttttctcgtgtggggtgttggccagttttggagtcatgtggtttgctgttgttttgttggaggttggtttgttctggtgccaggtgtggaaatcggaatgcgggaggtgaggtgcctgtgtttgcgttcgtctgatgagttgcccttgatttcgtgggggtgtggttgtgatatcaggtgattacgtgaagaggtgagggtattgtgcagtt

SEQ ID NO: 115971 - DNA, 946 bp, Physcomitrella patens
  Intron number 2 from transcript Pp1s178_59V6.1 (locus Pp1s 178_59V6) derived from phytozome v7.0 (chr-ID scaffold_178 ; pos 489619 to 490564 reverse strand)
tcgtagtggctatttactttctgtgagtttctcttcacgaatttgtgcacacttggcaagagagacaaacaaaattctataaaatatctagcgtgtttttgcgcgtcaaaattttcttagacaatagttctgggtaggaacttctgattccacatgaatcatccccttttcataaaccaaatattcaagactttcatttagactctatctacaattgcagcaccctggaacgtttggagacaatatttggaccgttaattgtaaatagacatcaaattcccgaagctcatgattgtgaaagtcctgaaagaggttcttcaaactcggaccatatttttggactagcaagaataggagcgatgtggaacttaccgttaacgataggtcaagaggattttatcatgccaaactcttgaggatttactcctgcgcaagtcgaagtgtgaaccgattttaatcatggccacaggatccctttcgaaacggatttgtataatccgatcatttccgaacagaacacaggcgcaaggtctaatttaagaggattaagtaggcgcttaaagttttagacagtgtaatagctacaaacctccttggactgtccatcctaagtcaaactgtgtagaggccgcattctagtattcaatttacacgacaaagtggcctaggtgcaactttttagtttcttcatgtgataccttgattttctctagtgttaaccagttggtggttgccctctttagattgtcccgaagaatgtccttctggcattagtataaggcacttgaagactttctccttcattcttaggtggcagccttctttcaggaatcaactggagaccctgatactactcagtggcggctgcattggaattatcatgcttacgaatcacttctagtttaagacgggtgacgttgtgttgaattttgcagaggtttcaaag

SEQ ID NO: 115972 - DNA, 409 bp, Physcomitrella patens
  Intron number 1 from transcript Pp1s72_294V6.1 (locus Pp1s 72_294V6) derived from phytozome v7.0 (chr-ID scaffold_72; pos 1407559 to 1407967 reverse strand)
tcttccgtcctcgtaacggatacaatactcgaagagtaagttaaaatactgaaacatatatgtgttcaaaacatgacagaaagttcaaaagaagaaatcaaagaaatggaggtacagaatatgtgtaggagagtttcactggaataatggttgtttttattgaataaccttgttcatagaaaatgaaagaggttttggtcagtacgaatagtcgggccgccgtggaagatgtggtaggtactaaaagggcaccacagaactcaccaagcctacatcactgtgtgtgactacagatacaatctgatccacctgaagttgaaaaggacttaaatagatgattataaaaggtagcatagaaaagatgcaaagcgcttatgtttgtcacttgtgtaggtggagcgaggtggcc

SEQ ID NO: 115973 - DNA, 932 bp, Physcomitrella patens
  Intron number 1 from transcript Pp1s69_213V6.1 (locus Pp1s 69_213V6) derived from phytozome v7.0 (chr-ID scaffold_69; pos 1525192 to 1526123 reverse strand)
agaatttgcaggtccagaattgtgatgagcttcaggcagaggaatgcgccgtcttgcatgaattcacagttctaaattatccttgtgcttggaaatatgtcagttgcagagtgaagggggaacggattctgacatggtttccaaaaggtcaattgtattctaattttgcctctaccgaatgtgtgaggcctcgcttacataatggaatggtttctaagctctggagttttgtgacggttgcagtctttttttttcccgaacattgagttgggtgagtgtctaatgtgtcgtatcatagtggtgtttttacctgtagcttgctacattgttcggtctcgttgcaagaagtgtaggagtttaatcccaagtacttctatccagggtgtagctttgtagcactcgacgccgaatcaagctcaacattgacgaacgaaggggtcattgtgaattcgcaaagttgaattcatcatagtcatgtctcgtctttgtgatgctcgtgacggaagatgagggttgcaatgggtcaatagtctgtaatggagagttgcgcgtttgcgtgtgcactcaacagcgcaagtgtgttctttgagagtctcgaacttagcactggagttttcattttctttgtcttcttgaaaatatagcgttgtttcggcgcatgttggcgatggacattactgaaccatcgttatggagtgcataaaaactggccgtgctgtgcccacttaatgtgaaatgaattttttggtcaggcattttgattttctgttaagatggagttcctgagtctggtattctgaattgcaactgcatgagaagcgttccggaatgtttgtttccagaatactgtgaaacttgtagacgtggttagtaaccttttacaatctcttttcacaggatcttgtgctcaaggtttggaattcgaacggaag

SEQ ID NO: 115974 - DNA, 332 bp, Physcomitrella patens
  Intron number 1 from transcript Pp1s12_102V6.1 (locus Pp1s 12_102V6) derived from phytozome v7.0 (chr-ID scaffold_12; pos 613707 to 614038 reverse strand)
agtcgcactgctttgtgcttctaatctgccgatctgtaacattctgaacatagacttagagtaccccttgctcttattttgcttgccttgttacaaattccgttgctaagaattgcagtttcttctgagctggattttcttccgaggtttacatttgcattttttttaattttatttttttaaatctagttattattatttggaccgggggtctttcaaattcaaagatgctacacgttcggatttaaagtgctctgaggctctgatcgtgctttttcccgtggcaaattcttgcagatatataaacttcagcgccggattcaaacaaccaa

SEQ ID NO: 115975 - DNA, 818 bp, Physcomitrella patens
  Intron number 1 from transcript Pp1s49_275V6.1 (locus Pp1s 49_275V6) derived from phytozome v7.0 (chr-ID scaffold_49; pos 2051622 to 2052439)
acctgcttgctggaggcttttcgccttgcacccaggtggtatctgttgctgagggatgtgattttggaggatttgtgcacatttgtggtttgttgatatcacctacaggcacaaccagcttcttcttgatgaaactagttcgtttacttgggttgtctgtgttgggtggtgcgtagctcttgaatttcaggatttcgttaaagttcttgtttagttacttagtgaagtcaatctgccgcagtctctgcttattctcacactgttgccgaatttggtcctcctggcggattgttcggtaagcagtctttagggtagcttctctcgctgcttgtatccaagcgcgtgtgctcctgcgcaatttttgaacatagatggaaattgctcttggggaattttcctcagagttatatctgcttctgctttttcatactattctctgtattttgaaatttgtcctggagcctttgtacgacgaatttgacactctgggtgttcaacgaacctcgcggaattggcagcccttttattctttgcctttcttgcgctacggggttatcttttctgaccttattgtttaatttattctcgtgtagtgaattctgatttgttaacgtgggtcagtcacgtgtaaacctccactctcgttgccatggtgtgggacatcaagctaaggcaaccaaagcgtgtcgtggccacagtacgtgaagtttataaagaatgaaaataagtgccgcagctgatccacatgtggcacataaatcattgaagccctttgactgattccaaaacattaaacaatgcaggtacgcaggataatt

SEQ ID NO: 115976 - DNA, 558 bp, Physcomitrella patens
  Intron number 1 from transcript Pp1s392_15V6.3 (locus Pp1s 392_15V6) derived from phytozome v7.0 (chr-ID scaffold_392 ; pos 48556 to 49113 reverse strand)
tcgccataaaggagtggctgtgattgagaaagcaggtatgcttttgagttatgtattagagaaagcgtatggggtgaagttctccgtggcttctttattgtttgcgaggatctttattaattttgaaaagctcacgtttgagaatttggaaagaatgactgaaataaatgttcctctcaaggtctatactccaattctttatcctagtttaaataatgcagatatctgtctatttaatcatggggctctacaaagacccagaagtttttcgagtggcatgtccattaacaaggtctagtgttctgcttgcggcgagagtctttatctctttttgttttaagttaagtttttctaaagtaatttattatcactgcttagtgtttgaatatcgttgaagaatagtttttttagaagcaggtgcagatcactagccagtgcactggaaaaatccttgtgtagtcatattctcttgtagggtttggattcgccagtggtaagctcttgtttctgcagaagttattgagatgtcttgcttgtgttgtcacagggaagcgtatc

SEQ ID NO: 115977 - DNA, 500 bp, Physcomitrella patens
  Intron number 1 from transcript Pp1s72_312V6.1 (locus Pp1s 72_312V6) derived from phytozome v7.0 (chr-ID scaffold_72; pos 1462664 to 1463163)
tgctcagaagtgtggataaggtcatttgaaggctctgaccatggtttgttttggggctttctctagtataatgtaaatcgggatggatcttgaagcggggccgatgtgcatttagggtctcatgaatttcgaagtgatgtgggttccaggaagaataattgaaatttacttacgatactgggttgtattgaaaaccattctgtttcaagggtttggtccttgaaaagacctccaatttccctgaagacgaactttaagctgtgatatgagtctcaatgcatagacagtcatctgttgctgtagacactgtctgtgatgtaatgccatgacttttgctgattcgttttcttcctttgagttacaaatttggtgaaataacatagatcttaccgactcgaatatgtctatattgatgcaaacgggttttctcgatctaatttctctactcgtgaaatgtgggtgtaggaaactgccgctcaacaacaaaagaaattgggcat

SEQ ID NO: 115978 - DNA, 596 bp, Physcomitrella patens
  Intron number 1 from transcript Pp1s77_252V6.1 (locus Pp1s 77_252V6) derived from phytozome v7.0 (chr-ID scaffold_77; pos 1389201 to 1389796)
gcaggaagggcggccatttgaagcaatttggaaatgtagcctgaatgctctcctttgtgcaaattcttttcctccccgcagttctgtggtgtcactccatgattttgcgatagttttttttctgaactttttttcaagctttggttattaggctgtttgttcgcattttagtggaatttttctgcagaaagtgatagccaggattgacggcctacattggcatctcctttgtgtaggaattggtgctagcaggtgcaaaaagaaataggtagcgttggatagataggattaatagtgcttcgcacatttctgttagtcgacacctacgcaactcatgtaatttattgaggtcttggaatgcggaagcagaagggttgaatgtcgtatcgcctttttctgcatttgagtgtgccctgtcgtttatccaaatttgtgacagattggttcggtctactttgaggccttagagttacctctcagtttactatgtgtatagttttaactgcccaaggtggaaagatttgagtgtggtttctgaactgtcattgttgttatgcctagattggcggttgtgcccgagcatcggtgaatcctgt

SEQ ID NO: 115979 - DNA, 805 bp, Physcomitrella patens
  Intron number 1 from transcript Pp1s197_146V6.1 (locus Pp1 s197_146V6) derived from phytozome v7.0 (chr-ID scaffold_1 97; pos 702204 to 703008)
gcatctgctgttcatccccacgctccgcatcgatcgtactcttctcttccaccatcaccatctctgttcaattttattcctctcccgctctctcttctccatatcttctccgctccgctccctcttttgcatcatctcttgtcttgctcccactcacaagttcggtgtccacatttctggaccgactctctcgctcccacggattttacaggtggttcatctaggcttgattttcgatgctttgaatctgggcttttttgttttttgtttttggcgtgtgctttacacgtgggatctgatcgtgcaaattttaaattacgacggggaatgaatgaggttgtagtgtgcgaggttcttgttggacaaagtgggggtgatggggagggtcctcgtgattcaacgacctgtgtagtcttcggtcggtagctgcgagattcggtatttgcatacgttttgaagaaggtgcgattacaccgaggataggtccaattgcatattagagagttgatggacatcgtttgatcgttaactgcagcgaaataagtccatggggtttttaggaaagttctggttcatgttgttgctgtcgctgaattgatggtttggaattattgttgaaggatttttctttgccttcccacagttcctttttctcgcaacggatgatcacgtagtggtttaaggatggatagattacgggaatacttttgttaggagaccagggaggaatcatattaccttgatcccaaagttgttggttgtgtgttcaggaagtggagtgatacatcgtcgcatagttactggg

SEQ ID NO: 115980 - DNA, 923 bp, Physcomitrella patens
  Intron number 1 from transcript Pp1s389_21V6.1 (locus Pp1s 389_21V6) derived from phytozome v7.0 (chr-ID scaffold_389 ; pos 146952 to 147874)
cagacctcggtatggtctcgaatgccgagataatttcattcggcaatgtttcggggacttgctagatatgtagagtggtcgataaatcctgtcaggatttgatgctttattaatctgtggccattttaaagtagcgtcatcttgcaactccatttggtcgtttgttttgtaataaatgtctcctagttgagtgagtgttgattcaaattggtcgtaaaacaggtgtgtgagattagaagcacgtctattttgaatcttggcgattgctggtgagaactattgcacgttctgtgtgatggccttggtatgaggtcgcaatttctttgcagagcgtcatgtatctgagctatgcctgtaatgtttttggtagtttttgtgtcatgcggagtatttagagcagtccacattagcactggatgggcagatttgtagaattcttcgctgacggattatgatatccctgtgttgctgttgtatttcaattattaaggattgagctttcttttccagtaactttgcactttctccaagatttgatgctggtggtcttgttaggtattacagcgattccttagcgttgaataggttgcgcatttgttgacccgctttgagttgtgaaggacgaagtagaaaattcatacttgtgaagcaggttgatgacattgttttcattgacttgtggtaactttaaaatcatcaaatatagtcaaactctttaagctcacgagatttgtagtatatattgatgaatgaaacatttcttgcagccgaatggtattgttctgacaagatcgcatcaggtttttcatttttcatgttgctctggaaataggtctgattgtcttagcaaggcgtgatattgactccataaaaccctccggcatgtagaagcttttatctccaaaaaaatcctctgaaggacg

SEQ ID NO: 115981 - DNA, 725 bp, Physcomitrella patens
  Intron number 1 from transcript Pp1s164_48V6.1 (locus Pp1s 164_48V6) derived from phytozome v7.0 (chr-ID scaffold_164 ; pos 244476 to 245200 reverse strand)
gcgcagctgagtctgaaatcactgccccggcgccggtgagaaccttttctgtgtcgaaattcagtctatgttgttaagcaaaattgacggggagaggggtgcgtgagggatgaatgtgcgagtgcaccccttctttgtgtagagtagcctgtcgcacgacgtcggccattggaatctgtgctgtggaggcgtattagcgcgaatgcgtactcatggaactcactcacctatccgagaccatggaataggtgaacgttcttgctttgtcattagctggcaattgaattgaatgagttatccgtcctcctccaaagtgacattggtgaaagaaatgggctgtttgacgagttgcccatgtggggccgaagatctgataacacaaacctatgaaatacatgctcgccgtagtgtaatcgacctttttcatcgctcaattcagagagattctcgtctatatcagctttattttccctcaattccttttttggttttagaaacttttgccacgtgtatcctgttttgcaagatagcgctatgtgaggcaaactagagtcgtacattcgaccgcggactggagagtgcttggcatttgaaaccttaaaaacccattacaacattatcagatctgtcaacagtacataattatgtgtcggtagtctttgcccacatatttggcacgtcatcatcttcttctgcaactgtggcaggcggaagaggaaggtgat

SEQ ID NO: 115982 - DNA, 531 bp, Physcomitrella patens
  Intron number 1 from transcript Pp1s36_336V6.1 (locus Pp1s 36_336V6) derived from phytozome v7.0 (chr-ID scaffold_36; pos 2190879 to 2191409)
gcctccccagtcgaacagctttgtttccttcatcggtaagttggtgtgatgccgttgcttttgaagttttattattattttcatgtttctacgccctcatgcacagcgctgctacatgctctaatcattgcagtgccctcaatgcagagagtttcttaggaaaaacgagaatctccgcgattgtggtggagcatacaacccaaaattggtggacaaaataaaggttaaggtcaagcgaaagttaccatgcagtggatgttgttgaaacagggtagctttcggagaccgctctgcaatattgaacttctcaacaattgcaagcgttacattacccagaacggacatttgtgaattggttgcgcattctattgcttttctccctatggctgtgtttctgtaacagtgatcaatgcatcagaccttttgaggattaccacaataaaactaagaaaagaagggtgaactactttgatgtattgatccttgctttggcaattaccttgcagcagttttaggcatacaagacaaggg

SEQ ID NO: 115983 - DNA, 488 bp, Physcomitrella patens
  Intron number 2 from transcript Pp1s7_330V6.1 (locus Pp1s7 _330V6) derived from phytozome v7.0 (chr-ID scaffold_7; po s 1931057 to 1931544)
tacacccagccgaacagctcgaagaaaagaagcaggttcaatccgaacaccttttttctgaaatcgacagaaataaggatgggtgagtccgcttaccaacgcacttcaagattccttttaacccctttgatggctgttttgctatgtttcaggtacataaaccttaatgacctgtttcacgtaggattccttatcatttttcttttgcagcagtttgtttttttatagaacatgttaggaattcttctctacttgcaatgctagcatcccttgctagattggtaggtttgtcggattgttgatcatatttgtagcctttgcagtttcatcttgccatgaatttctttgtatttgagctcctttgtgtgccactcgaaatgattcgtctgcgatccggtattgcatatggtttaagacatacttcattattttgttatgttttcttaactggttgcttatgttttgattgcctttaggtgtttgattga

SEQ ID NO: 115984 - DNA, 818 bp, Physcomitrella patens
  Intron number 1 from transcript Pp1s358_63V6.1 (locus Pp1s 358_63V6) derived from phytozome v7.0 (chr-ID scaffold_358 ; pos 359148 to 359965)
tgccgagggaatgtaagaatctctccttcatagattcagtgactgatctaggtgctttattagtctttttcgtagtgctcttaactttcattttcaaacgagacatatcaactcaaagagtctggtcttcatgaaaaaaacaaaaaaaaacaaaaaaacaaaacaaaacaaacaaacaaacaaacaaaaaagaaaaaacgatcgtgactagtaatccatcgataaacgcatctggctacttctcaggcctacaatgcatgcaggtgttgggggcaaatttgaggatgagttctggtcaaagtaaacattttgcaggccgcttccttcaatcaacagcacgttctacagacacagagttatcttccttgtaaagatataacaactcttctaagttatttatttatataaataattttcctttcgcctcaaactctattccaatgcgggcacataacgtaatgcatcattcgtcttgagtgtacaattctgacctagtcgttccagttcgacgtcaagacacagcatcccatggtgcaattgcatcgctcctgcgtgtttagaatcgttttcatcagcctaaactgacccaccgcgaccactcttgtgcacatttcgtctgagataggtcgagacccactagtgcatcgaaaaactaaagcacttgcaacaccgattatgctgctaccacaagtcaccgctcagagccacatccacaagctaactcaaggatttcacctccacatccttgatgagatccgccctgggttctcgtttcacccttttgaacttcaatgtcctaccgaaaccagtcatcgacc

SEQ ID NO: 115985 - DNA, 470 bp, Physcomitrella patens
  Intron number 1 from transcript Pp1s270_60V6.1 (locus Pp1s 270_60V6) derived from phytozome v7.0 (chr-ID scaffold_270 ; pos 395183 to 395652)
aacgcacctccgtgcaaccaattttccacttggaagtaagcgctggttttcttctcgtaagatcagggtttttgtgaattcctgtatcttcaaaaaaatttgtagcatgctagagacggctcaaccaagtttcctcatcatttttgaatttccagaattacttcgtttgtggtggggataatgattgggatgggcgttacgaggatttcatccatattgatacacacggacaacgtgttctgaactattcaaattccttcaagatcagtgatcgataaattgagtgtgttgtagattcaataaacagaagttttcatctgttgaatatttccctgtctggtgatgtttgataaaatattcatttatttcggatcaggagtcttatggtttcttgtcctgccttcatgtggagggttgtgaggttagcttttgcatcaaattttgctttcaattgcgtggagatgtgcagg

SEQ ID NO: 115986 - DNA, 373 bp, Physcomitrella patens
  Intron number 1 from transcript Pp1s62_33V6.1 (locus Pp1s6 2_33V6) derived from phytozome v7.0 (chr-ID scaffold_62; p os 445671 to 446043)
ggttcataacatttccggctactctttcttacaaagtaagtgatcccatccctcccttcccttcctccctcctcttcacttctcttccaacccaagacattttccattccttctcatattctttcttttctttttcttttattttctctgaattatggaatcaaagatgctatcttacattaaaatttctttctggttcattctcattcttgtgtttacatgaaacattgtaaaaatcaatcttcaaatcattcaatttatttatattgtttagtttttttagttttcagttttgtgattatattatcagttcacgtatttcaaaattgtattgaaagtgtttaaatctaatgtatgtcagatacaataatag

SEQ ID NO: 115987 - DNA, 752 bp, Physcomitrella patens
  Intron number 2 from transcript Pp1s26_247V6.1 (locus Pp1s 26_247V6) derived from phytozome v7.0 (chr-ID scaffold_26; pos 1732704 to 1733455 reverse strand)
gaaacgcagtgggagttcaaacatccctgtctctggtttgattctctttcacctcgactattttttattttttttcttttctgtcctttttctttttcgcttttgtaaataaccttgagttacgacgaaaatataagggttggaaacgaagggcataagtacaggctcgtcatgaaaatagccttcaatttactagtttagctaacgcagattttgttttgagcgtcatcgagatagtggtctctaacgtgatgtcagacgataaggttacttaaatcctttggtatttgtaagtcatgtaagttaagtgctctatttttctctgatatttgtggaaaaagatttaagttatttttcttgtatttttcctacaaacggaagacttcagtaaagaactggcaattcatgtgattcgagtttctaattctgggtttaagtgtccactttttcaaaattagtgcagagatctttttgttactgttcataaatgattacttttattgtgttgcaagaaattaagatatgcaagaggttgctgtaggaatcataccaagcctggctacttccaaacatgattatggtccatctgtgctagatgtaaagaactctaatcgggtgaaaaattgtcatcaatacagatcacaagtaaaatcagtgcgaggcatacattatttgagcttatcgttacatgtgatgtaacgatgttttggcaggttgatcttacacagtcgtatgtttgttgcaggcgacat

SEQ ID NO: 115988 - DNA, 650 bp, Physcomitrella patens
  Intron number 1 from transcript Pp1s26_247V6.1 (locus Pp1s 26_247V6) derived from phytozome v7.0 (chr-ID scaffold_26; pos 1733767 to 1734416 reverse strand)
aggtgcggttccagtgtttgagtgtttcttggaattgaacgtcgttttctttttcttagttcttgattttctatctgaagaatgtggttattgaaatatgcgaggatgagctgaaatatgtttttattctatgttcctctgtattttatttatttgtttatatttatgtatgcaaagatcgtaccaagagcaaggtttatcactaggtggcgtattggtatggttagctatcgaccatgctgtgatgtgtgcagagagttaaaacaattttcttagtagaagctgagaattgagctggtttctttttaagggaaatgaaagtggcggcaaagagtaaggaaacatggacattgtgaatcagagaacaaatgagcgatggaagtttgttgggagagagatgatatttagtttgcaagtttctcgccagataatccttttctcctgaatttaatttcttttaacattttacatgcaatctacatcctcaagtccgagttgactaaattttgtgtaattattggccatttttgcctttcactgcattcaggagtccaaccagtttttgaaaatctccaaaggattgcgaaacaggtgatcagtcttcctcactagaggatggtcggtgtattttctctagccagggcgaaaag

SEQ ID NO: 115989 - DNA, 748 bp, Physcomitrella patens
  Intron number 1 from transcript Pp1s139_3V6.1 (locus Pp1s1 39_3V6) derived from phytozome v7.0 (chr-ID scaffold_139; pos 27849 to 28596 reverse strand)
ctaagtgagttcgctttgtgctctcctgttgctgttagggattttcgtcgcaatggcgctttgaaaacacacaactcagggtttaaagctctttgaattatggcggtagggattgcacatgttactgctattgattgaacaaagcacagataatgcgaggacataaacccctggtaaggtggagatcaaagtgttcaccttcatagtgctctccttcaaatatgcatagtattgagataattgctgggaaattccatttgataagtagtacgagttacgtcttttcattcgtgcgagatgtatcattgaactaaacgcatagagtcgcttagcatgcttgctctgtgccctaatgtttagacctgcatttaattttcatagctttgcattttttcgtttcttaacatctcgcatctacttcttcttcttcctcctcttctttgtgtatatggttgtaaattcctcgcctcttggttctttaaatctccgtttatttcttttgagtataagaacagttttgggaatgcttgaagattaattacctttttcctgatagaaagaatacattgtggatagaatggccccaggagacctttgtaccacttggtattacttttgtgcacctgtgtgtgtgtgtatatacacaatccggttgaaattggtcaagttttgtgtaacttactaaaccgttaatcatgtttcaatgagctcaggtcgctcggtggaaagtttatccttcgtattgaag

SEQ ID NO: 115990 - DNA, 525 bp, Physcomitrella patens
  Intron number 3 from transcript Pp1s174_37V6.1 (locus Pp1s 174_37V6) derived from phytozome v7.0 (chr-ID scaffold_174 ; pos 348444 to 348968 reverse strand)
taaagggtaagctatttggttaattgaatttgcaagattagaattgcgatgtgagaacggtagtttgagatctgcgtgcttaacactaatttaactgtcaaagacgtggaatgttctgttactattctgcggaggatgcattgtagtactcgttagtatagatctagtgacgcttttctggaccggtttataacctattgtaatgatggtatgttatcaaaatgtctgaatcattcggtaaccttgtttgctgctgttgcaagtctgacttcaacatgacgagtagtaataatgaaaatacattttttgtacattcgtgtgcatcttcacctacttaatttggcgtaataattttaataagtttcggtaaagtgtcgagtcagactcgtcctctgttttcatctccggcttatacttctgttctaaatatattgaaggtaaatgtttattactagttgtgacagacgtatctggtatctgaattgtgcaggaaaggatcgaagactggtgcatctagtcggtgcg

SEQ ID NO: 115991 - DNA, 582 bp, Physcomitrella patens
  Intron number 1 from transcript Pp1s12_356V6.1 (locus Pp1s 12_356V6) derived from phytozome v7.0 (chr-ID scaffold_12; pos 2537479 to 2538060 reverse strand)
aatccagtgcgtagattcaatcccttccccttcgtttcagcatctgaatctctcacattagtattattcttttggatgcgacactgatagcgaggaatttcgttatgatgttcaattaggtttttcgttgtaatcttggtgcggatcagtcgctttgtttttttttacgagtatgttctagagaaattgtacatgggtgctgcttcgttacctttccaaaagcttgctaaacatcgaccacaatttaataaatgttaatctcgaaaggaacacattgcttacttgcaagctgttttgtagaacttgaacttggaagcttgaatggaagggtacatattccctgctccatagtttctattttggtgccatttttcttcacttccttgatctacttaggtttaaataccttccacttgaattatatcgctagatggtgggaaattttggaagatgtagatttaaagaagtcagaagcacggcaggtgctggaaacactggtaacactgtcttagtggatgtatttttcatatcagttaattttgattggtttcagaagaggatacgacacagacaccaacgggg

SEQ ID NO: 115992 - DNA, 727 bp, Physcomitrella patens
  Intron number 1 from transcript Pp1s39_424V6.1 (locus Pp1s 39_424V6) derived from phytozome v7.0 (chr-ID scaffold_39; pos 2250261 to 2250987)
aggagcttctccctgcccttgtggtgagtcttttatgaccactcttggtggcacagcgttcttagtgatagttcggtctgcttagtgttttttgggtcctactggttttaattactcatggcataggtcgtagagtgaaatgatgatcaattatttccctattcgtttgacaaccgcaatgatggtaccttattgcttcaaacttgccgatcactcatgaactcgcctcagtgtcctttagacacgctctttcggcattcttgtccatttgttttgttttgttttgattgtttgtttgtttttaattttgtcagaaagcatcatctcaatttttttctaggttattctgcttcctcagttctgatgggtgcagtattcgatgtattctcttcttcttgctgaaacatccctttggatgtcgtccagttggctgtgactgtaatgtatagcacccactgatgcagtgaggtgatgaactactgtttctctattggtttgacggtcacaatgatggcacattattgcttcaaacttgctgatcactttcatctacttgcgatcgtaaaacgagatgtcaatgacgaaggtgtttcgaagctaaaaaacacattctggaatagttaacatgttgaagtggaatttgttgaaagcctcttttcaagccattagaggcttgaattggaacaagttgttcttaccaatgtttgccctcattttcaacagggca

SEQ ID NO: 115993 - DNA, 702 bp, Physcomitrella patens
  Intron number 2 from transcript Pp1s28_58V6.1 (locus Pp1s2 8_58V6) derived from phytozome v7.0 (chr-ID scaffold_28; p os 399059 to 399760)
gctggagtgcaaaacacaataccatagctggattggtaaggttttgatcaaaacttaagttcatgtgtcatttgctgacaaatgtcggcacatatttttaactacatttttaataatatttttaactacattcacatatttgagactattggatctggaaattcatttcaaaatctcttccaccaactactatttgatattcctggtatgcattggcggtaaatgttcatatcaactaatcttttgcgggtagtttcttagactgaaattgttttcatagtgtcctaataaaggcattgcatgaattatgacagtttattacgaaagggactcgtttgactttgtttgaattatttggcacactcatttgtagacatccgagagttaccttcacttctatcatatcgaagtatctgtgaagcagctgtggtttcttgtccaagacaattcgaaacttatcctagtcagtttggtcctctcaacgagtttgcatgttacgttgtacaaccacacaacgacagagtatgagactatttgaaacatcttttgttgttagttgttttatactctcatcagagaacttaaatctcaatggtgtggatgttcttgcctaaagatcatttatctgaacatagccctgggaagatcaagctttaataattttatgtcttttacatccttgcaggagctgcattgcaggag

SEQ ID NO: 115994 - DNA, 946 bp, Physcomitrella patens; identical to SEQ ID NO: 113795
  Intron number 1 from transcript Pp1s7_65V6.3 (locus Pp1s7_ 65V6) derived from phytozome v7.0 (chr-ID scaffold_7; pos 272871 to 273816 reverse strand)

SEQ ID NO: 115995 - DNA, 1048 bp, Physcomitrella patens
  Intron number 1 from transcript Pp1s49_91V6.1 (locus Pp1s4 9_91V6) derived from phytozome v7.0 (chr-ID scaffold_49; p os 793621 to 794668 reverse strand)
ctgcggcaatttttcatttgtggggattttaagaggtgagaattgtgactggagtttttttttttttttttttttttttttttttccccattggtggggatggttggtttggtccccttcattctggcctacattgaaaaatcctggtaaactctcggatttcagcatttgtacgccgtgcatcagtgtgtgaggattgtagagggtagaggttgagagtatctcggatgattcatgttttttgacttacaataaactggtatcggtgatacggtctattcgatagtgatcatcgtgtactaaacgttcgagggtttcgtcgtatttatgggaattccctgctgcgctcgattgaattcgtttttttttttttttttttttttttttttgtaattgcagtcagagatgacgtcgaagttgctgagagattttgtttatttcgtgttaacgtttcctctcatcccctcggtacagcatgctcttaaattactccatttagaactacattgtgctctagaaatgtgggaaattgttcgcagattctactttaggccagtcggttatactaatgcctatattttagtcactgcttgtgaaagtctatgtagatagtcgcactaccggagtgtccgtgtggaagatgggatgtgtatggctgcatagttaggtcgcacacggagaattatccctttctagtgtctcgttcttcggcattgtggagtatttatcgtctcagatcctcaactaactggcagcgatgcccctcttcttctttttttcttcttattctttcccttcatgacgagggacgtagaggttgctaagatattcagaatcgagaatctttgtattttggatgtacttaattgtaataagctctgtttcttacgaatcaaaagaacagctccccgttcctgtttcgcaggtctacactagttttggtattaacgacagcatttgtaagttggttaaactcggaatgcattgtgtaaccgggggtttacttctttcaggtgtaggtttttttttcgccgcttaccaatcgcca

SEQ ID NO: 115996 - DNA, 684 bp, Physcomitrella patens
  Intron number 1 from transcript Pp1s59_102V6.1 (locus Pp1s 59_102V6) derived from phytozome v7.0 (chr-ID scaffold_59; pos 407971 to 408654 reverse strand)
ggcatctcctttgcaattacaagcgcgtttttgtggtatgagatatgctatgtcacccagtccactttacagatcatctattatatacacttagaatatcacttctttaggaatatgcattatgttcaattggatcgtgaatcggatacgcttaagttacatgtatgtcaaaaagtcaagaacactattgcaatttgatcatagaagctttgttttgtttttcgtttttttgtttgattctgtgaatattttgagtctcatttgtgatgaactctgttcaacttgtattatgattattttacatgtcatacaaacttggtacagtgttccaatttaatattccagcatcagtttgttgataacttcgcatcaaacagcatgttttcccctaaaggaagcgcaacgcacggaagccagaagttttataattaggaagacccttcgaacagcattttactttggtagatgtgtacgttttacggtcctttccgtctgagaaaaggcatggtttaaaacatttaccagaaatcgccgctcgaagagtaattctttcttgatttattcacgtaattttcaaggtcactgcttctaattgagttacctgcagtgttcaatttgtaaaggttgaagtgcaaagtgttgtttgcagtcgaaagctgcgaaatcctcaacgtgggtcggagc

SEQ ID NO: 115997 - DNA, 506 bp, Physcomitrella patens
  Intron number 1 from transcript Pp1s159_77V6.1 (locus Pp1s 159_77V6) derived from phytozome v7.0 (chr-ID scaffold_159 ; pos 429169 to 429674 reverse strand)
gcgggtatatccaggacttcattaccaaattatcgcattctgtgttttttttaccatggtatctacctcgggtatcatccttcgtgcaggaattagggtttgcttgttcgcattgttgcgcggagtcctccataaaggctgaaagcaggtgcctcaccgaaatcctgtgttggctgcgggttctcgtggatctcgctcatctgtcgagaggatggtatttgggtcttctcctgcccatgagataatgcattattgtatttggctctgttgtggagctgaccggagcactgagttgtgctgaggttagcacaggtggttaacgatcttgactgtcgttagggtatgggattgatgctatcagttgcacttttttttttttttctcctccttcttgtgactagtgtttttggttttgtttttaattttttgttttctttgagtcgttgtggctgttagtgtcgtttggatatctgtgagttcataactatccgcggggttcgttgtag

SEQ ID NO: 115998 - DNA, 957 bp, Physcomitrella patens
  Intron number 1 from transcript Pp1s44_264V6.1 (locus Pp1s 44_264V6) derived from phytozome v7.0 (chr-ID scaffold_44; pos 1682748 to 1683704)
cacttacgcgctgccgggaggtcatctcgattttggtaattctgcttttctcgtcgtgtacccacctcgttgccttttctgtggtttgtgggttcggtgttgggtgatggtttgacgcattggcaacttttgatagttttgtcttggagattgtgttcatctttcggaagaatctgtgggaagtgtttctatttttgtgcttttgggattcttggagtggcactctttgcagctgggaatgtgctcgaaggttgtcgttgtgcggagaggaggtcgctggcggaatcggacctgcagattcttgtgtctgggtcgtgagcggctgttggaactgttgccctctctaggctgtggtgtctgtgatatggtggtgtgtgactttgaaaaagaagattgttgagtctacttttcaagtggcagtctatggtgtttgtcattgtagtttatcattaaaatttatcctcttggttcgtatttggtcaattgtagggcattgtgttaagttgatgagttgctgttctgaaattctttttgagggttctcttctttggaagtgttcatatgcagctatgtttggcctatcttgtgcttgacagttcgttttactaggcctactctgctattgttgtcagcaattgttctcctgcaataatgttgaaatgatactgtgtgtgggtcttattgtcaacataggcacaacccataaatactttttagatttacacatgttttgctcactctttttttgaaatgatgatgcaccctttactgtaaggcacttcttacgaacatcctcatgctatcatgaattcgtttcctgaaccaatttgacaaaacgcattgaagtcgtcccgctggttgtaattgaagcatctatggtttcattgagagcctctactaaacgcgctgatgaatgtggcaggggaaacctgggaagagtgtgccgcaagggaagta

SEQ ID NO: 115999 - DNA, 472 bp, Physcomitrella patens
  Intron number 3 from transcript Pp1s26_125V6.1 (locus Pp1s 26_125V6) derived from phytozome v7.0 (chr-ID scaffold_26; pos 1110675 to 1111146)
ggtaagcagattatgttaccgtctccagtatattttcagattattgtttttcacttgtttggtttttggagaagccttggtgaccagctgaaatgtgtagtcagtattttaaaatactttaagtggtcatctgattttattcgctaccactttgcctcggctctgagtttctgttttgaaactttgtctacatctagaggagattgataatttctaatgttgcaacgcgttatttaaggagttgtaggcatcctaaaactagcacactgggttatccatgcgtttgtagtaatttcatgtgttttgagaggatttaaggggataattgaaatgtactactaccttgcttagtctggtggagtgtgaacgtcaatgttaaaaagaaatctacatgtcgtcgttctcgtattttattccatcgtatattttttcttctgcagttggacaatcgataccaagtattacacggctg

SEQ ID NO: 116000 - DNA, 999 bp, Physcomitrella patens
  Intron number 1 from transcript Pp1s136_39V6.1 (locus Pp1s 136_39V6) derived from phytozome v7.0 (chr-ID scaffold_136 ; pos 314606 to 315604 reverse strand)
ttgacgctgcgacatttccttccaattaggctacagtgagcttctccttcatacagtccctccattcacattgttctcggtcaagaaaagtttagatttctggagatgaatgcggctttgccgaccttcacccagttgggtctgtcaacgtatttttaactgacccacattgagatatggatttttagtagaagattgacagacggagaggtgtagggataagcataggcgtggcattgtatctgcggtgtgctatctctatttttcttatgccagcctttcgttttttatgggataatcttgttttctaagtttgttttgttttgcttcttccggcattgccaccgattcccgctcataattttgatcacttgcttgtcatgttttcgattgctgtttgtgggtatttagctcaagagccttgggggagggaatctgatttgggtcagagtgctgaatcgtgtagtagtagtatagtggcaatgcggtcttgcgatggatttattaggttcggaaggcagcgtgatctgatgagaatgatgtttagaggacacagacggatcttgttgtcttaggttgagatcttgtgactgttttttggcttgtctgttgtctgtccttgcaactcaattattggctccctttatgacgccgtctacaaggactgtttcacagctttcatctgtttaagtgtcttctgagccgagtgctgtgaatcgttatatgccgccctcgtctcatttgcctgttcttctcggctcctttcgattgaatttttcggtcaagtgtaagttcattgccgattcttttttgtttttgtcagaattttatccctgatttgaaggtctttcgagcttctctgtgcctgcggttattttttctttctttagcagcgcactttagtcgagagtcggtcaaatgtattgctcgcgtttggtttacgctcttgctcaaatccgtgactgtattatctttagatatctaccgacctcctcaagc

SEQ ID NO: 116001 - DNA, 775 bp, Physcomitrella patens
  Intron number 1 from transcript Pp1s42_209V6.1 (locus Pp1s 42_209V6) derived from phytozome v7.0 (chr-ID scaffold_42; pos 1811431 to 1812205 reverse strand)
gccacccgctccggagctcgcgaggatttggtttgttgcagttctattctgtgttttatgattttttgagtgaggaatttgtcactcattttctggtactcttgattgaggggttccagatttttgatgggcttagctagatgaactatgtgattgttaaaccaactgggatgtgtattttacttgtgatagtaccctcgagcaagtttcagtcattggattgttgtattcaatttcgtgtgcttattggcagttttatttatttatttttttatttttatttttgttgggaattgattaatgtgtgtgtatgtgtgtctatatatatatatatatatatatatatatatatacatacataagttatacgtgggttctttttatcctgaatggtttatgtttgttttagtgttatcttctttctcaagaaaccctaattcttcagttgagggagttgggtgtgacaagtttgccggtgcactacttcttggaatttgaaagtgagggatagggatttcagaagcgtgctagaattcgaaaagctcaatcactaccagaagaaggtttaatacatgaagatgtagttattagaaagtcattatgaatttcattatgttctgtatacaattaaatgatgaactcggcttctcagcggctagcacacaatgattttaatttggcagttgtatgattgcaactgaccctaagcttgaaatctgagaaatttctgtcttccgcagttgctcgaaaaggacccagctctcagcaagtatca

SEQ ID NO: 116002 - DNA, 183 bp, Physcomitrella patens
  Intron number 3 from transcript Pp1s37_145V6.2 (locus Pp1s 37_145V6) derived from phytozome v7.0 (chr-ID scaffold_37; pos 823403 to 823585)
gatcccgaggttcttagtttccaactcaaacaaactcttcgttgacccaactgcgattattttactgctctctcgcttcttgtgtatgattatggtcttttgtgcgccccgtcagcttttcttattcctatgtgatgggtccatgaaggtggagtcgaaagggccgatcgatataactagcag

SEQ ID NO: 116003 - DNA, 842 bp, Physcomitrella patens
  Intron number 1 from transcript Pp1s127_109V6.1 (locus Pp1 s127_109V6) derived from phytozome v7.0 (chr-ID scaffold_1 27; pos 729995 to 730836 reverse strand)
tcaagatccgcaaccacggagtgcctctcgaagtggtacactcttcacagtccatgtactagagtttcgtaaattacgtcctggtttatctaggctttctagatatagcaacgtcgggccataattagatcgatcacaagctgcctgctgggaggtttagttaaacactacaggctgcttcattcgccttatgaattctagcacttgatagtagagattatcacaggttttcgcgtggtagttgagacatagagagataaacattaacgttttagtcgacggatttggattacaatttgctgacagtcagcagcagtgcgatttcctatgactggtagtaacgcaatctggtatcaattacagcgagccaaagcgggattccatttatgtagatttcatttcaaagacacgtgaacaatcatagagagtgctgggttgggagtgaaccaattttagaacgccaccgctccggacgcgctcacaatcggtcaaaatacttccgagaacagtgcagatcattatgcttggttttacttcttggaccaagtatcaaagtaagccacgtaaacatagcggctgcctaagaagatcaccgcttatcctatcgtagatcatgaattctagtacccttgacctaccttctttaatgggtgacaagagcatctgtaggggatgttaagctgtagaacgcaggtttactgtgatggaccatcggcacgatgaatgaggtagttgtgtcgatcccattgtaacatacttcacagacacaaacctagaagacatttggcagttgttgctgttgtaactgtagtttgtcttgcaggtaaagaaagtggagagta

SEQ ID NO: 116004 - DNA, 744 bp, Physcomitrella patens
  Intron number 2 from transcript Pp1s290_4V6.1 (locus Pp1s2 90_4V6) derived from phytozome v7.0 (chr-ID scaffold_290; pos 224911 to 225654)
agctcaaggtaatttggagcatgaactcatcattggaaaggtctctgaagatatcatctacaattgggtcaaatagtaatatttgtattgaagaaaccggtgtggaactaaatagaagatccgtgaatccacaaagccttgcatcattacacttttatggacgttaagataatgagggttggagatcttcctgtttgagcaacttgtgtttcaggatgtggcacgacgtgctatcaatcgtgttattgagctttgtaatgtgtactctacttttacagatattccataagtctctgttgtgcaaattggtgtccaactgaaactgctatgattgatgtgcttagagaggtattggtttttttccgtgatccattagattttaagtcaaacgttggtggcactagttttattttttcgaggagctgtaaagattggaatgcaatctcatttcataaaaacttgacatgcagttctcctaaaccctaaaccctacaatttggtgggccttgtcacctcattttactgcaggatatgcatgttcacattcttaccttaagaggtgtattgggaatcatttaactcctggaagtattattgtcgtagcttttgctttatattaaagcattttttgaagggctggtcgtggtgacctgtgcatgcagatacagcctgattatttactgtatatgccgtctctatttgtagctcatagctagtttttcactggtttgtctaaaccaggtt

SEQ ID NO: 116005 - DNA, 768 bp, Physcomitrella patens
  Intron number 1 from transcript Pp1s71_167V6.1 (locus Pp1s 71_167V6) derived from phytozome v7.0 (chr-ID scaffold_71; pos 857147 to 857914 reverse strand)
tgtagttgatacgtcggggcccttgggaccatcaggtatttctctagacttacccgattgcctgtgatcctgttgtggtttctttcctccagtgcttggaccttgtcagcaatctacaacagtgcctacatactttttgtgatgatattttatttatttctttttgtatatatgcactatcctcgcctccgccgtttgttttcttcctagttagcaacccacgtttccaggtgtacatcaagctgtgcgattgaatattagtttgtcatgataatcgtggacagtagtatgtgtttggtttgttcactggccgtgtaagccgtcatgcctgggtgttggcagatgcgttgttgtaattgcggttcaatagactctcttgattgcatggacgttttgagagataccctaaagctgaagctcttatctggggcaaagagggtttttttttccatgtactgcacatggaattaaaatcgaacaaaccaatttgctgaatataatctacgagagctgatgaagttcgtgagagtcttcatctgcttgtcttcttaaatcatggttttggtcactattttggatttctgtggaataaacacaaagatctgtctgtacaatgatttgaattttgagctttctagtagtaagtgtattcctgtagttggttctctttccgattgtgttgactcgttgtcgccaggtcacacaatattagactgagtatttccctcttcaggtgtgaaagcagatcttgtggattctgaagacgaa

SEQ ID NO: 116006 - DNA, 923 bp, Physcomitrella patens
  Intron number 1 from transcript Pp1s11_231V6.1 (locus Pp1s 11_231V6) derived from phytozome v7.0 (chr-ID scaffold_11; pos 1897488 to 1898410)
cgtttggctgtttcgtgtccctgtcgatcgagctggtatggggctcacttgatctctcatttcgtttctatagttatatatatatatatatatatatatatatatatacaattgttttcttaaaagctgttttatttgtgtgctgggagggtagtaaggtgaaggatttgggcatttgcaagtgtaagatgttgcggggtgttgggagtgttgtagagaggttgacattgtggaggttggcagtgatgttttgttttttttaatttttaatttttaatttttttaatttttttattgtggagggttgtagtaatgcagttgtttgattgtgtcatttgtgttgattgtttgggagagtgctttgtagcccttgcgaggtgttgttggtgttttcgagctgcggtttgtttttgggattggtgaggttttgtcgacgtttgagagtgaggtctggactctggagtgaggatcggggtttagggagtactgttgttttgaaagggtcggtgagctgggggttgagcattcttggattaactagctgcatgttgtcatcccgtgcaatacgttttcctgaaatggtgtcgtaaggtttgattggattgtgataggttttgattattgtaagaggctattctttattactttatggtttttgaatgaaattgttttaagtcatttctatacatctagctggtgaggcgcatattacatagttatgttgaatgtgacagagggaatgctgctagttaacgcacttgtctaatgttgtagggctaggggtttcgggaggattattccgcatctgcattgactcatggagctggctaatgggttgacggtttgaacggttagctatagtggctgaagatgtcgtgttatgcgtaggtgcgagattgctagggttttttgggaccactgac

SEQ ID NO: 116007 - DNA, 839 bp, Physcomitrella patens
  Intron number 1 from transcript Pp1s228_21V6.1 (locus Pp1s 228_21V6) derived from phytozome v7.0 (chr-ID scaffold_228 ; pos 217561 to 218399 reverse strand)
agcctacaattgattctcgaatccaaaagtaacaggtgcgtgttgagtttattttgaagacctgtgtactcgcgcattgtgcagtgtcctggaaaatctacatgcctgaatatgaccgaggtgtgggatatccatttgaagatatcggtggagtctgagtaattcgatagcgtagatggtgcattatggtatcagggttctatcacattgtgtgaagacgtttcgttgaggctagttgcggcattgaatgcactttttctcgtttgagaaattcacgagaacatttctcatgtgaggagatttttggaatataaggctgttgactctttgtgactggttttaatcacgttctttctagtctctggaaatgagttcagtgcatggatccaattgtggttgagattctgtagaggtggataaacatgcaataattaggttcggagatgaagacgtttgtttaggttgtcaataagagtggtaggtggtgtccgtggttgctgtgcgcgattcaagagcctctccgctaattgctgaattctgatgaacacacataatttttcgtccaggtgaaactgcacttcatgtcgaatattcaagttttatgaattcgttcttgtgacatttccaattaaattttaaagtaggttttcgtagtctcactttagatgcttctgttggtgctttgggcttgcgaagtaaagtattaatcaaagttattttcttctctatcaactcaaataaagtgattattttaaccgatgttattttcttacgatgctgtgtatggttttgcatgtcgtgaaggtggtgcgcctcttatattgtactttttattagcc

SEQ ID NO: 116008 - DNA, 634 bp, Physcomitrella patens
  Intron number 1 from transcript Pp1s422_18V6.1 (locus Pp1s 422_18V6) derived from phytozome v7.0 (chr-ID scaffold_422 ; pos 196537 to 197170 reverse strand)
gggacgatactgccaccgacgaagctgcttccaaggtacaattttcctgaattgtactctgcatgtgtcaatgtgatcagggacgacggacttgcgaatggtgacattgtgttgtcgtatgattatgttcatgctctggttgggtttatgtgtggcctatgtgggttgtgtggagaatctgcaacagtggtgttaaatatcgtttgtgattaggtttattggagctttgtgagcctttctagagcgtcatgactggattacattctacttcctttttatatatatcttcatttgaagctttatgatccaattcgacgcgtgctcgtgttttttcatttctcctttttccaacattttttttaacatcagtggagaaattgaattgtcagatgggcagtgggattaaacacctgcatcttagcccttcggcatcgaagtccatttttttaggggataaatagcgtacacagtgccacctgtgtgtgggattttgtctgaacttggtgagaacgattgttactagtttttatgtcttccaggtctgatgaaatgctagcgtgacgctggaaaattgacaacatgtttacttttgattggaagtctttttctgtgcgtttgctaggaactagaggag

SEQ ID NO: 116009 - DNA, 1004 bp, Physcomitrella patens
  Intron number 1 from transcript Pp1s60_59V6.3 (locus Pp1s6 0_59V6) derived from phytozome v7.0 (chr-ID scaffold_60; p os 405136 to 406139 reverse strand)
ggaaggttagtttctcttgctactctgtccacacaaatccacatatatgcaagtctcgagcgtgagggcctctttcagcagttgctcgtgacttgggtcatagaacgttaaattatattggacaggatttagcatgacagttaaacagctacatgaattaagcagtgatgggaaacggatgggagaaacatgatgtttatctttaacgacatagatgattcaaaccaatagtatggagtggaagagtgcggggattcagaacagaatgggaactttttattttgtaggacttgaacccctacggcgtgtatatgtacacgtcaaatttcggtgcatatttgtagagttagaaggatgcagggtctgatagtctctagtccttatagcaagttcctttatgtcagcccatgtactcagaaaacttgatatgaaaggatgcttcgatatgagagatagatggtcacttaggatcctgaatccagtagtggtagtaccacttttagtctatcaagcgcaccctttattccattgagtatctcagaatgaagccacatttgttgaagtctttcatttatgatgggtttttttgagtgttggtgcattttgtcaagtctcaggtcaattttccctggaatagcagttggaatgttctcctttatgtacttacaaagtaattagagtttgagaagaacaatggatgtaggatattcttttgtataatctcttcgtggtccatgagttggtagcttgaatggggttcggttttcaagcgggttctggggattggacttgtgacttgcgtttcttaatgcgagccccctttatgtggagctacatacaggggtgtcattgaagtaagattttgatgcaactcgttaattttggtgcgtttgtgagagcctttgttttctgtgaatttctgattcgaaccgagttgtctgacgtctcgattatgttttttttatttcttcaaacggcagaccttaaaccataccattaagtat

SEQ ID NO: 116010 - DNA, 720 bp, Physcomitrella patens; identical to SEQ ID NO: 113924
  Intron number 1 from transcript Pp1s2_734V6.1 (locus Pp1s2 _734V6) derived from phytozome v7.0 (chr-ID scaffold_2; po s 4502654 to 4503373)

SEQ ID NO: 116011 - DNA, 841 bp, Physcomitrella patens
  Intron number 1 from transcript Pp1s12_130V6.1 (locus Pp1s 12_130V6) derived from phytozome v7.0 (chr-ID scaffold_12; pos 766335 to 767175)
tcacgctgttgagaagtctgccgggcacaagcaaggtgggtgcctcgtcttagtttgagggtttccgacgtgggttctttttttattattattttttttgtgtaaaaaaataaaaataaaaataattttgtctttgtagtcgtttgacacatatcatttggtgttttttcgtacgttgctgttgcattttttcaattcatacccaggatttttgtgtgcgatgacgagaattgaacccgacctttgttggtatctgagtagctttgcttttggtttttttggtcgtgtcacagggaagaagtaatcgtaatgtctagattggtactcttgcatttgtaatttcttcttttcctcgatactgcgagctttagtcgggtgtttacagtcgagggtaactatggatcagttcggatgagactatggtgctgtaatatgagatggcgtcagatctgtgtttctgtttgttacagtattcacctagacgtgtactgtttgagatttcttcattgtggctaagcccttcactggaataatgtgtttcattgtttagtgctgtttttgagttatctttttactgaagttctatcgtctcgtaggcctcatcagtgtgtcaacaattttcctacttgagctacacagattgctctttttgtcacgattttgagtatttttgcgtaaaattcagtcgccagagttgtctagtcactaaaatttcctcttctagaattgggtttgacacatttcgacgatcatattggcaagcaaactaaagcatcctgctcttcttttcacacacaaattaaccgctaatgtttacaacctgctgcaggtccaaacctga

SEQ ID NO: 116012 - DNA, 679 bp, Physcomitrella patens
  Intron number 3 from transcript Pp1s189_50V6.1 (locus Pp1s 189_50V6) derived from phytozome v7.0 (chr-ID scaffold_189 ; pos 288883 to 289561 reverse strand)
cgaggctatcgagaagtctggaaacgtattgaaatgtatgggttctctatagatttttctaaagggtttcttctgaggagcaaatctcatctttctaagtatcggtttttagtcttttcaagtgttccctgttacttaggacacctatatcagtcctctgttttagtgggtagcttctaactttgatgactgtatcatcatgggaatcatacatggtgttttcctgccaaccgtgatttgaacaagtgatagagcatatgtgacggagatactaatttcagaataatcttctgtactcatctatagtgtttttgtcttcgatgttcatcagcgaagaaatgctgaaatacaagaagaagttatcaagaaatccttttgaagaattatcactcaacaggagtcttataaggtttctcgaagttgttgagttttttttatgatgtctagagttcttgttgtagttgaattgttaagagcttgattgtcagtcctcttcagtcttttcctactaatgcggttacaaacaagaccctaatgtcttgtgctcggtttttggattaatcagcgcactttttgcttttgtagatcttgtttcaattctttgaggttttgggactgaggtacaccaacaatgtgctattgaatgggcaggaatcctgaaccagatatatccggagaa

SEQ ID NO: 116013 - DNA, 608 bp, Physcomitrella patens
  Intron number 2 from transcript Pp1s114_132V6.1 (locus Pp1 s114_132V6) derived from phytozome v7.0 (chr-ID scaffold_1 14; pos 772254 to 772861 reverse strand)
tcacaatcagtctgaagggccagaaagtttgcaaggtttgttgagtacatcccttggcttccaaagttgtgatcaacgttctatgtaaaacgtaccttcagcttgtagcacagatataatgtagctcatcgtatgttaatcatacttgctgacggtggagttttaacatgtctgtccatccgtgctgatggtgatgcacatactcttgtggtatggcttgtctacacgtatgtgcattttaaggttttgactgtgtaacagtagcgaaaactttagcctttcttggagaaactgatactgagttgaagaggacttttggatcccctatatgatgcatggtttctaaagtcaaggacgggaatgtgtcgttaggactgcctgtgtgctagtatcttgacgctaatagtacatcgtgtgggctgccacggtggaagaatggttgttatcatggtcctttgaagatccaattttctttgatgagcttggattttcatgatctgctgatgatgccctggtagataaggcttgttcttgtatcgagaacatgttattgataatcgatggaaatctttatttatttatttatttattttttgtgattcacaggt

SEQ ID NO: 116014 - DNA, 747 bp, Physcomitrella patens
  Intron number 2 from transcript Pp1s28_396V6.1 (locus Pp1s 28_396V6) derived from phytozome v7.0 (chr-ID scaffold_28; pos 2495743 to 2496489)
attctggtgggttggcagcttcattctattgtcctggcgtcaggttgtagacccattttttgtggaacattaaaatttgtggtcatcagttttatgaaacttcacacgtccaagtgatctccaagttcaatttgtgtaccgatcgtgcttttcggtgaatctcaaacttacacattaatgtagaaattagaaacattgcggcttgacgtgttggaagccctactaattaagagtaaactgcctcttgtatccaaaaaaatatgacgtcgtacaatgggcaatctttagtgcgagcttttagaacgtatcagatctcaaacgaaaaaaaatatatcgtactttttctctgtatacgatgctcagttgagcttagtttacaccttcaaccaacttcaacctcctgttttttctccggtggtccctgcttctcgatgcatagcagaggattaccacaaggtttctgggcgcccttgtaacattttaaccttgaaagaacatgattatgtatgaaatgggttttattcctgtaaactgttcatgcttgcccaaatgaaatcatcgcaggtatggctttgctgtacattatgatggtctttggttgcttctgagttgtgtctttttcgcaccctttcagcaaagaatgattttgagttgtccgtggtgatgctcaatatacttatcattgtatgttcttaattttctggtcttttccttgttgtggttgcagtattaaagtcggtaagtaaa

SEQ ID NO: 116015 - DNA, 611 bp, Physcomitrella patens
  Intron number 1 from transcript Pp1s136_142V6.2 (locus Pp1 s136_142V6) derived from phytozome v7.0 (chr-ID scaffold_1 36; pos 797280 to 797890)
gcttcggcgtcgttgtatgaagacgttgctcacgatcatgttttctctgccgaacaaatctcgagagcatatgttctcatgatttgagcttgtgtttttggtgatgttttgaaggagttgtgtttaggaattttttgtgaggggggattgttggtttgggaatttggtgtctgggatgctggattagtgtgtccgtagtgtatgcagtggtgggaaaaattggattattgagatgggcaattggatgtttggctttccatgacgttgagcatcagttaatggtaggggtagtgttttgttggtgtttagggttttgttgcttttgatcgtggagtggatttgctcgcggatatcattaagtatgtcctggttgaatttttggtgccagattggtggtttgtcaatttgtccttcactcgtcttcagagcgctttggagaatgacttgatgtttgatatgatttacacgtcaattttgtgcataccagctctggtggtgatgttgcttgtgtagaaacgagggatggcattgcaagatttagtagttgtattcttttgctccagtgtctaacctgaagacagaattgtgcagagaattgagtgggatcgtgt

SEQ ID NO: 116016 - DNA, 846 bp, Physcomitrella patens
  Intron number 1 from transcript Pp1s114_206V6.1 (locus Pp1 s114_206V6) derived from phytozome v7.0 (chr-ID scaffold_1 14; pos 1224093 to 1224938 reverse strand)
ggtttgaggatcactgcggatagtgacgatctgaggtatggcattttgcatggtggagagagatttttggttttgggtgaagggtcggagtcctaagaagagatacagttgccgacgtggatgcggttgatgccggatcttgaattgaatgtttagagtccgcgatatttgtggggggtgtattggtggtttgagcactggagattcgaacaatgatgtgtagttgtgaaggatgcgttgggaggtttgtgaaggaattctgtttattgcggagtagatgtgtggagagtggttcggtctgaagagatctggggtttgcgggttttaatccagtcggtaacagtggtctgaagttctgctcacgtttgtgaagtgtctgttgattgacttcgggttggtagatgcgaggcaaacctagagttgtcgcacaatttattgactttagtttgcagtctcagattcagtgttgagatttgctgagaggcactgattttacgtttggagattttgtttatttgcattgtttcttaatttaataataccctaaaagattgcattgacatgaggggtccaaggtcattcttgtccatctcattcaaattcaatcaaagtgttccaaggtcacgaaagcagtttagagttttgagtgcttgtagctgtcttcttggacgaggaagccagcttttggcttgtgagagttggccactaggctacttgcgtcgtagttttaggtctgcaatttgtcaggtaacgatgtgtttggaggatgtcgtctttgcatatcgtcttgtgtatgtatttaaaacgttggttggtgcctccaggttttttcaataagtggatctc

SEQ ID NO: 116017 - DNA, 844 bp, Physcomitrella patens
  Intron number 1 from transcript Pp1s37_154V6.1 (locus Pp1s 37_154V6) derived from phytozome v7.0 (chr-ID scaffold_37; pos 940285 to 941128 reverse strand)
ggcaaatcagaattttattggttgtcatgtacagattaggaattgatttgcggcgttaagttgaggatttgttttttggttttttttttttttttttttgatgttgttgtagttgttgttgttgttgtttgtttgtttgtttgtttgttttgtttttttttttttttttttttttttctgctgaggtttcactttcaattggagtggatcttgctttgcagacggtgtttcataagaaatctgcagcaattggaatgacatgtattctttggcagggtgtattgatattagctttagttttggctgaaaaccttcaaatcgtctctctcaaattattaccagttttggacaggtttacagccgagcgaagtgcatgattgattggattctttagaattatatgttgcggggtgtcctaattctatggaaaatgcacatcattatgaataaatcgacatcacggtgacatgaaatgctcggaacttgcgtgaattgatggtaaagaactcaatacagccaactcattcactgctgaatacatctgaacgaatcgattgtaaaataatacatggtggtttgtaagaacctattagtcaagcctagaatctagttcatatcctctcttggtgcaacgcacatataagcttggtaatcattacagttttaagcattttacctggaaggtgtatctctccaagctaattgtgtacttgtctctaccgttggagcagtctcgtagttgttgctgcatctgtaccgttttgttttctgtctaatcacgggcgattaatctcttcctctttgttaccatcctgattcattgtatctctatattgctcagaca

SEQ ID NO: 116018 - DNA, 1016 bp, Physcomitrella patens
  Intron number 1 from transcript Pp1s307_55V6.1 (locus Pp1s 307_55V6) derived from phytozome v7.0 (chr-ID scaffold_307 ; pos 324662 to 325677 reverse strand)
aggtctgcatgttaatctatgcgtgtgcacttgtggtgtatgattgatggtgcttgcttgcgtgttggtttttcggagtggatcaaagctggctcttgcgtggtggagttgagataaggctatgcccatttttaagttctcccgggcagtatctgataatattctgtgtgcgttgctctggaaattggtcaacacgaataagaacagaaatgtcggtgattcttagaggcagggatctgaacgctagaggagaaaacagatttttcgatggctcacggttttttgtaacctttcgtgctaagtgcggtcataggccgacgaacggacgccgttagtttgggtgtcataattgtggttgcgaggattttttttttttttttttttttttttttttgtaacactccgttttgagtttaggtgtcgggtgtatcccttgtgggcgccgcagaaagtttttgttttgttcattaaccccctgcagactgatagaagttgcgccagagggacgtagcaagcactgcgtgcacataatgctcccatgtttatgtttagagaagtactcacttttggttctgcgggaggtccggtaaatgaaacgctgagttaaggtagatttcggtccaatagaagatgtaattttcaaatatttcaaagagtttagaaccgaagatcgtgcacgatacagctaggcaaccgaatttcctacctgtgtctgttcgccataacattcggtgaagcacgcttccctcgcgcactctcgtgtagcaacgctgaattttaattattttaatttaattttgttttgttttgtgttctactcgcatctctctcaaagtgaggtttccgtagttgacctggtttttgcaaccctataatgtcggagaagggatcgagggatcttgtgttcagaagcggctttggtgctcatagtgccaagctctatgcttatccaatttttacaaggtttaccctaacttgcagacatattttcccggaacacgccgggcagttttcga

SEQ ID NO: 116019 - DNA, 545 bp, Physcomitrella patens
  Intron number 2 from transcript Pp1s37_118V6.1 (locus Pp1s 37_118V6) derived from phytozome v7.0 (chr-ID scaffold_37; pos 624381 to 624925 reverse strand)
gaaccattgtgcacggtactatcacaggtatgtgttcaaagttagtatggcgtctttttcttaccctaattctacatcacggtgaggtaggtctgagacatattcgatttcgcccttatttaataatttctcctgggattgggtgactcggctcccagttacaatgtctgcgcttagcagagcattttgaatttctggtgtatccctcttccccgttttctttcctttccagttttgaagtttgaaggagtttacggatagctaaccctggtatccatggaatattgtaaagggtctctcatgaagggattcttacgcagttagtttttcttttaagtattacctcgatgtttggtcgttgtcattctgtagtttctactctagctggatatgccgaagtttcctactaaaaaagcgacataaaatgtattcagcttggctactgtacgaaaaatgcggaattctgtaataaacatagctttctggcgaaaacgatggcgagtcgttgatgttattacttcgttttcgcaggtgtagatatcagc

SEQ ID NO: 116020 - DNA, 772 bp, Physcomitrella patens
  Intron number 1 from transcript Pp1s59_51V6.1 (locus Pp1s5 9_51V6) derived from phytozome v7.0 (chr-ID scaffold_59; p os 182876 to 183647 reverse strand)
aagttctcgccccgtgagttttttctatcctcactcatgagatattggttttttaatttttttagggctgatgttctgctcgagaaacgagtctcttcttgcaacatgggtctgcggggctttgttggatgtttctctgggctgacttgcggcttcctgcgaaatcacatgtgtttagagacgctttgtgggcaagcagctcttctgttgacggtcattcgatgttgagatcttcattggaagtttgagtctactaggcagcacatgacctggaaaaatataaaaacgattggatgacttaatcgttatctttttgatgtgatgacttaatgtgaaaggcttaaggatgggttgagtaggcgctggagctgcggtttgcactttactctgattttcgtaggtttaggtttcggttctgacttttaatttgtgtgtcaaaatatgttcgcgtgcggatcgattattttttttctctttcgaggtgtctgacatgaattctgtacaaataatgggaaagtctaggttaatttccagcgcattttgtgcacaatgatcgcactggacgtggatagctttgggttttgccatgaacaaaccctatttttttccgccgttggagtgttttataaagagttcaatcagtgttttcgttgttttttatgactgttttagtgtagtgctgcgcctgcgagatactctactaactgtgtctcaggtaatttggttttcctttgcaggtgtgagcagctctaggcgcaagtcccgaaaggca

SEQ ID NO: 116021 - DNA, 811 bp, Physcomitrella patens
  Intron number 1 from transcript Pp1s65_107V6.1 (locus Pp1s 65_107V6) derived from phytozome v7.0 (chr-ID scaffold_65; pos 599820 to 600630)
cttgctgttgatcaggtatgagaagacttatcaaatctctggtccactcatatagcctctgctttttatagaatggattattgacaattagaagcggactagtattcttttttcttttactttcttcatttttaatattttagcgttcttttggatcttatctcaatttctcctttgattttcgccttgcatacaaagtatcaggttcataaattaatatacggggggtcaaatgcttttacattgggttttaaaccgttgcatggtccttttcttgacgcatcactagccctaaatcagtgactatctgttacttgcgatttattcaatctgtgttagtctggttggtagttttagtgtatgtacagggttctcagactcaacaatttgcttgtggctcatcgctaccataactctaactttctttgttaaatcttctgccttaaaatgtaaattagcacaagacgaactagaggcagcattctcgttccccttactgattctcgttttgactgagagagtgtcttcgttaggtttttatgattcgtagtttgtggagtattctcattatttgctaattgtttactaaagtcctggtatcgtttatgtttagagggtatgtatgtatatatatatatatatatatatatatatatatatatatatatatacgtttgtaaggataagccatatatgttggatatattagtgatgaataagctattgtggtcagcaagctccggttatatattaaggatccgacatgcattctgttgatacaaagctcatgcgtatgattcaggttcaccct

SEQ ID NO: 116022 - DNA, 728 bp, Physcomitrella patens
  Intron number 1 from transcript Pp1s213_15V6.1 (locus Pp1s 213_15V6) derived from phytozome v7.0 (chr-ID scaffold_213 ; pos 127235 to 127962)
cctgggaccattcgtgtttcaggtctgaattacagccttgctcaactcatgcttcggttttgctcctgttcttgagagtttctgttgtcgtagtgggtgagggaagtcatctctgattctggaatagagaggggcctttcagtgcaaatagttaaggtttaataattcacaagaagccagcttgagagtatcttgtctcgaagtctgtttgggtgatacatagtgggagtttcgagattgccctaccacgtgtttccaagtggcagtgtcacatttagtatcacattttttttgtttgaaagcagttttatgtagtttccgtgaggcttgttgatatcgctaaacattcttgttaattttccatgaatttccggagtgtcgtttgctttcgtgaatatctcttgcatctcttggtgcagagtgcagaggcgttgcagcttcattgcacacactagatttttcatcgagatattggtcactcggaatgtttccttccaatttgtaccttatcatacacttttgcttgcaatgtcaatccaaggctgtatgtacaaattcaatcaactaggttacgctgctgtgaaggagttaatcattcaaaattatctaagagctggtctcctgtccgccatgaagatcacctgtttaaccacgtgcccacctctaattctggtctgtgttgtatgcctgcagttttggaggcagtggagcttcccaaaggtcttaca

SEQ ID NO: 116023 - DNA, 814 bp, Physcomitrella patens
  Intron number 2 from transcript Pp1s158_49V6.1 (locus Pp1s 158_49V6) derived from phytozome v7.0 (chr-ID scaffold_158 ; pos 324143 to 324956 reverse strand)
gctggtggcaccagtagatcagactattggcacaggtatatttgatattgtatgagttttgttgcggacatgggttttacttgtaggttggggtttcttcaccgaaatgtttggagtgagtagttgttcacgatattctgaccctgccgtgttcgtttttttttgttttttttttttgttttgttttttctttttttagtggtcatcgtgagtaaagactctgttgttgatctcgatatttagtcttagtcctaatatttcaacgaattatgggttagcgtgttttagtgataatgtatttttgtagtgagtactttatttctgtttatccatgtgattacaagttcgaatgtgaatactcagttcttttgaattaagtaatcgattgtgacgggtcacacgcccgaaagtaatgatggaattgtaactgtttctttccttttcttttattttataactttattatgttgaaccaccgtagtgtcgcaacgaattatagcttgagacgatttgcaatttgtgaaatcgttttttgaaagaatgcgagtcttagttctataatatgactttatactttgatttactgttatgcgtttttgtattctgctgtgtgccgttcaccatggaccggaatagctagttagaaactaaggcatatcggtgcatttacggttggggcttacgttgagcttgcgagacaaatcttaaaagaaatcggttaacatcggcggttatattttggaggccctttctgagcttccaacttatttttctccttggtgtctggcatgtaacgatgaagcttggcagctgc

SEQ ID NO: 116024 - DNA, 303 bp, Physcomitrella patens
  Intron number 1 from transcript Pp1s44_234V6.1 (locus Pp1s 44_234V6) derived from phytozome v7.0 (chr-ID scaffold_44; pos 1533944 to 1534246)
aacctaatgtaataactctgtttcttattaattcatgggatgaggaagaatatgtttactatttcattaattttggttgatcgaacgtatattgcttcaattttgatcaaaaccaaatttacatggtctttgtaagttttcatgagataaaatggcagctttgtatttgtgtttgcatatatatatatatatatatataaatagacctgtgcttttacaaaatcaacccacccttgatgaagaacatggtaataatggtgaatgtggttggtttgcattggttgcagctctaatagtggagaa

SEQ ID NO: 116025 - DNA, 863 bp, Physcomitrella patens
  Intron number 2 from transcript Pp1s44_234V6.1 (locus Pp1s 44_234V6) derived from phytozome v7.0 (chr-ID scaffold_44; pos 1534250 to 1535112)
aatctagaggtcatttcttttcttttcttttcatgatggttacaatgggcaggtaaatttagtaaaaaccttggtctatttagcattcatatatatatatatatatatatattcatgtacatattcatatgtaatgtgtgcgttttttttttttttttttttttttttcctctctttttacaataagatgtttctcaatacttcatgtcattgaagtaataataatttatcttttcctcattcaatttttgctctgtatcagacattgcttgtttacacttctaagattcttaatgtattctctttctgtttcatattgtaactatttttctacaactacaattactgtcccaacaattgggtttgcctttggttacaacgtagtttgattaaaaaaacaaaacaaaacaaaacaaacagaaaacactcttgaacaaagtttagtccaaaatatcagtagttatttacaaatcaagaccttcaatctttcctcccgttaaacttccgaattaaatctcatgtcacaatcgaccaaaattcaacacaaaaaaacattatccacccatttgttcaaaaacacgacccatcactgaacatcaatgaagctcccatcttgacaaaaacccatcttctacccacatttgtgaacaagtaactccaacttgacccacccattcttagtaacatttccaccacttccatcactcttttccaaatcttagcgaatatcacaaacagttcacggatcaaatcatacaaaaaatcctgcaatcttttgtgatgaaaaattgattttcacaaattacttttaaatctgagtttgtgtgcatcagattctagcacgagagcttgcagccttgggg

SEQ ID NO: 116026 - DNA, 727 bp, Physcomitrella patens
  Intron number 1 from transcript Pp1s65_281V6.1 (locus Pp1s 65_281V6) derived from phytozome v7.0 (chr-ID scaffold_65; pos 1649981 to 1650707 reverse strand)
ggtttggaggtttgtttctccgcgacagagctgaggtgttcgtgcgtgattgtagtgtgattgcggttgtgggtgttgcagtgcagtggttttggctcttgtggtggttctgtgatgagattactcggttgagattcctagaccttggagtgctgcagttattgctaaccctaaggctctctgttgggaagaattttttttgggctcgtcaacgtaaaatctggcaacttagagttttggttagttgatgacttagagacgtgggggaggaatttcatgtcatagtgcttgtaacaataggtggatggcttttaacatcttctgctgtaatatttgtggtacgatgcagtgccatattatctctcacttgtctacagagattttataattgtcgttgtaatttttcttctttaagtttctatgtttcttttgaatcgtgacgatcaaatctgacgcctgcttatcaattttgagtctctccaaaaggatcgattctggtgcttacgataagctataaacgtttggtgtgcgtgtgagtgcaactctttcgtctatgagtcacatttgtgtactcggatatgagctagggtttttctttagctaccagttcctcttattgagtcttacagatttgactgatgttaaagtcattaaagtcaggatggcatagaatggtataaggtgttcacgaagaggaaattggtttctttaggtgcagagaccgctc

SEQ ID NO: 116027 - DNA, 853 bp, Physcomitrella patens
  Intron number 1 from transcript Pp1s28_24V6.1 (locus Pp1s2 8_24V6) derived from phytozome v7.0 (chr-ID scaffold_28; p os 147881 to 148733)
tgctgctggagcttttctccacatttcgtttacaggtcggtgtttattccttgcctcttttttaattttttatgttatatgatatatctttttagttcaggacggttgtcgcaattggtggtctttgttttcttttatctcacttcacagagctgccgatgaggcgttgggagtggaaatgaagagatggtgtgagtagctaggtttattttagaacccttttgtggatctcctaggtatgatagttttagagaagtaattctaaagcatttctgtcgtgggtcgtggcattacgtgggtttttgtcattgagcgaatttcgttttagggttcgtgtggaaagtgatggagactcacggtgattgtatctcaagagtatctttgtcccccgatcggtcttcttaatattggggttacttcggttttagaatcgtgaaatgtaggtgtatagatacgcaggtagtgtagttcacgttttctttctttcgtttttttggctttttgcctttcggctttgtgagaaataaaatcgtcagtattttttcgctcattattaccatggaatttacaagactattttcttcatcttctgaatgatccatgagtatcgtaagattttgttgagagatactacagtgtagttcagtgtcataatatttctactgcaatgattaggttttgtgttgcagttcatttttaatttgattacctaagatggtttatgacgacacagctgaatctagctcaaaacttcattttccttgtcaacttactccccgatcctcataatattcatcagcgtgcgtctgcgtatgcagggaccatttttgcgtctgttactcgggttttagat

SEQ ID NO: 116028 - DNA, 549 bp, Physcomitrella patens
  Intron number 3 from transcript Pp1s222_75V6.1 (locus Pp1s 222_75V6) derived from phytozome v7.0 (chr-ID scaffold_222 ; pos 356945 to 357493 reverse strand)
cggtacaaactctcttccatatctttttgcataaccattttagcatcaattcgtcaagtcccgacagttaagtttaccctgcaattttaagttaagtaagcacgagccttgcagggtatatttgttctaggtcttaaagcgtattataaaaaatttacgaatccacaccttcaatttggctcatgcatgtctaccaaagtacctatgaaaaagactttgtttctgtatgaaaacgatttcttcaccctgatttttgacttttcttgtttccttttgcttgttttttcacaatttctttcttgaaaagaaggcttagtgttagttgcgaagtgcataaatagggttaataggaccataaaatgcgttacatgcagatctgctcagctgttgctgttgcgtctaagtttcagctcgtgatattttacttcaataattataaataaatctgcagctcttccgaaaagggttggacaaggacgctatagcttacatggtaatcttaacttgatgacagaccctgaacactacgaagggatttatcaccttgga

SEQ ID NO: 116029 - DNA, 465 bp, Physcomitrella patens
  Intron number 1 from transcript Pp1s59_328V6.2 (locus Pp1s 59_328V6) derived from phytozome v7.0 (chr-ID scaffold_59; pos 1679835 to 1680299 reverse strand)
tctcgcctcaacggaaacgtgttgttgttgctgcggtgagttgactttcgcttcgtttgacctgagatggaatggaatgtgatgagtttcggtattttcctgcacgttttggaggtgttaggggttgaatatgatgttgggtatgggaatgtgcctggggttgttgtcgaatttcagtgatcttggtcagtctcgataaggtttttgttgttgtgtgtgaggatgtggaacccctcggcttgtttcgtgtcatagagtaaattagaggcgattttgtctattctacagatcgagcctgtcgagagtgtacccagtagctgtatgattccagcgttgcttgtcttcgttttctgtgaacctgttagatgaattcttttgttgtcgcgcacttttgatgtcttagtggtttagtaattatgtttacagtaattagagctgagtttgtgtttgacagcgagcaggaca

SEQ ID NO: 116030 - DNA, 750 bp, Physcomitrella patens
  Intron number 1 from transcript Pp1s116_5V6.1 (locus Pp1s1 16_5V6) derived from phytozome v7.0 (chr-ID scaffold_116; pos 25790 to 26539 reverse strand)
gcccttggagtctcggtttctacttctattgcccggtattagctcttttcacattttggtactgattatgcttgtgtgttgtaaaaatcggattgaattcatttgatattgctctgtgacatgtgaattgtgtatggtgtgctactgtcgcaagtatttgcttgttttgttaacgggtatgcttcggatggacagtgagtcactatcaaagagcattggtatttctgtggtagatttgctgtcgtaattctgtgttgccagttgtgagaaagaatacatagtagcgtgcactaagctcattgaaattgtcggaacgcgactgaatcattttaattagttttattattttttggtatcgaggatactgatgaggagttctgactgcgtcgtagtgaaatgacttggtgaagactcaagctttgattgttaatgaaattgcagccttaaaaacatactttaaagatggttgccatagtagtttctcaatgctgtaaaagtatcctgcattttagggttgagagtttatgcactaccgtttcaattattcagggaatctcatcttggaggaagtagagtgccgcctggcatgaagcataggactcgtagaaatgaactagacgaaggttttgaagtttctactggtcatgaatttaccacggaattgcttacaaagagctctgtgagtgagggcatgccaacaggcacatggtgatgcacttccataacaatttcaatgtggcacttgcagag

SEQ ID NO: 116031 - DNA, 892 bp, Physcomitrella patens
  Intron number 2 from transcript Pp1s359_7V6.2 (locus Pp1s3 59_7V6) derived from phytozome v7.0 (chr-ID scaffold_359; pos 52504 to 53395)
gagccgaggcctccaggtcggtttaaccatcatcatcttgaatttgctttttatctcgagcatgttgttcacgattgggttgtatttctttttcttcttcgtttttactgccgcgatattgtccagagccgaggcacacaggtcggctaaactactccatccttcattttggccattcgaagctgataagtttttgcttctttttcgtagttgggtcttaattttatggagttttaaaagggagcttatcaaccacacactaaccttcatctctgccctagtttttagctcctctcgcattcatttctgcagttcagagatggaatgttttggtgagggggcttatcaacgttgaagtttatatttgaatgcaaaaggagcttaaaacgaatcctaaacttctaaactgtaaacgttcattgcaattaaggcagaagaagtattgcatcaattctagtgcccttttgagtattttgagatgctttgaagtatccagtaatgaattcaagaaaccggaatttaggcaagcatggaaaaaattagggtttatatggtggctgaagctttaccaggccattacgctgaattggttaagttatggaatgaacctaataatgaattggctgagaattttttcaacttactggccgaacctcatatgcttcattcgcattaaagtcagcaaccgagagaaaaagtacagctcatcaggtgattgcgctacatgaggttgggtccaagcctcactgatgaccagtaattcactagttaaatcctcggatctatctcatgtggctatcccgtctttgatggtaatggaaatgaaggacctaactatgttgtgtttttaggcgcagggaatcagcttctagaattcgaaggtagtgaactt

SEQ ID NO: 116032 - DNA, 754 bp, Physcomitrella patens
  Intron number 1 from transcript Pp1s223_31V6.1 (locus Pp1s 223_31V6) derived from phytozome v7.0 (chr-ID scaffold_223 ; pos 217991 to 218744)
aacgtcggcgttgtatgtgcttttctcagtttttgtggtttcactgctgtgtgtgtgtgtgtgtgtgtgtgtttatgtgtttgtttgtttgtttgtttgtttttttggtgctacatttctttggttcgatctgtgcggagtttcctagctcgttgaatggattttaatattgttgtaatttcccttgagagtccctttgtttgcgccgatgatggatcgtttggtttgatctagtaggtgaagtatacataaactgtgattgggttgcctgcatcttagatttgtttcacggtgaaatgaatggatgctagtgtagagcactggcaaaatagtgtacacgtcagtagcaatggagttcatgcgctgaacattaaatctgctttgtagtaattcttcggatttgagaagcggaatatgaatcccggttgctgtgtatatgtttgtcttgtctcgttttccttggatgtactattggatcgattttagatttgtaggatcagagtaaatctggaagtctaaattttttcgtcagctaaggagaatgttaggatttataccctttacagtggctgtgctcactttgagcatttctgcgcgacctggaacctgggtctctcagaagaggtatttgttttgtggtagtcgtggaggcgtaaatgaattgtatttagggttattgtcgtggagataggatgatgaactctacttttagtgctctaagatggtgcaacttgccagggggcgtaccgtactg

SEQ ID NO: 116033 - DNA, 939 bp, Physcomitrella patens
  Intron number 1 from transcript Pp1s89_237V6.1 (locus Pp1s 89_237V6) derived from phytozome v7.0 (chr-ID scaffold_89; pos 1163756 to 1164694 reverse strand)
atcaactcctccctcctggacgtggtgtgaagaaggtttggggcccttccttccatcaccaccacctgcttagggtttatcatatttggttattttgttccaatttgatcagtggacgacgcggtcatgttcgtggttcgttccggaattgcgtcgtgaaaggggaggggggggagtattgcaatcggattattgcatgtgtggtgcggattgaggtggcgatggtattgtagagactgaccgtcttgaagaagaaataaaataaaataaacagcaggtataattttcattaattatcgagtttttaaccgcttatgccggttgtagaatcgacgacatgatcttttttcggagcttacaggattgggagatcagtggtgggaagagttcgcagcgtttgtcgattgcaggggtgtggtgttagggttttgatgatggtttgtttgctggttgctttctggtgcgaagcgagttttggagcaagagacggttgaattttctcaggttttactacgtaggatgcaaatgagctctagtagcacttcaatatcgggtggcgttataacctgcgttcattatgaaaggacattttcatgcggacatttgaatgtggataagattctagaatgtagttttctgtcagaatgtcgagacagtggtgagcattgttatctgtctgtattggtgagtattggaactgatatctcatgtattttccgcgagcaacaaggaatcatgcgatggctagcattctattgctcacagatgattgagacgactgaagtacgtgtggaaaaacgtagttgtcgcatttacatcatcacttacgtgtgagatttgaagatatcgtaattgtattccaattaacatgttaatacaatcggaaagttaggcaatgtcagattcatcctttgtgtgtgaacgcaggtagtatttctc

SEQ ID NO: 116034 - DNA, 526 bp, Physcomitrella patens
  Intron number 1 from transcript Pp1s79_158V6.2 (locus Pp1s 79_158V6) derived from phytozome v7.0 (chr-ID scaffold_79; pos 993320 to 993845 reverse strand)
tagtgggattggcagcagagccatcaggtagttctcacgcgtgaattggagccgtggcatcaaacctccctctctcctcatctccctctctctcgctatctcgctcggtgcgtgagtgtttctgggtgcccatctcatttcttcataaagtggatcctcccaagcctcgtttactgtagtgttcacttggttttttttataactcttgctctccactggtgggtgcgtagttgccgctgaggtatagtggctattcccaaatttttatcagagcacaaggccaaggatgatctttgatattatggctgggtgttcgcggtggcaagtctttagtggatcgttcgtttgtttcatgcatgtttggggtggtttttagtcctgagttgttgggattttgtgtttggaatagtattgtgctgggaggtgttttggaggaaaagagaagagtgtgtctgaggaagatgttttaatgatggggggttgtttttttgggttgccctgagatactgcaggaagtcgagagatc

SEQ ID NO: 116035 - DNA, 849 bp, Physcomitrella patens
  Intron number 1 from transcript Pp1s15_355V6.1 (locus Pp1s 15_355V6) derived from phytozome v7.0 (chr-ID scaffold_15; pos 2046420 to 2047268)
agggtttcgttttgccttgagtttttataatccaggtgagcttctcgggagacggtttgcgttgcagtcttcaattcgtcgattggaagaatttttttgttttagagatgcttttgtgttatttgttttcattcttcaatcggggtgactcgatttttgcggaagttctcagtccctggtgaaggttcgtgttgccctgagatcggtctgaggatcgatctctagtcttttcaagccttttgtatggagttattagaaagggacatagcctacgctgttggaagatagtagggtttggtggatgctcgtgtaacctgactgtgcgagttagtcgtcatggcaagaccattagcttcgcggactttggatttttagttagtcacccgtagattacacgagtattctatgctcccacttacgtgtgtacttaaagtcgaatgtagaggtgcactggtgttgtatgttttattttttgtatggttgttagggttacccttattctgttgtgtaattattagggataatgagaaaccttttgtatatgcattgcaccttttacctcagaacggagatcgctctgcatctacttattattatctatatccgttggggctatcatggaagttaacaggatttgaggggaaaagagctaggtctaagctagaaaatctggctctttacaaaatagaccgtacgtccacttataaatttacgtgtgtagactcttttaacgggttaaataaccttaccttgttgaaagttgtgtcgaaattcaaatttattgatattagttattggtaatctgtttctgcagatatcttgtacttctattagcgaaccttttaggtt

SEQ ID NO: 116036 - DNA, 975 bp, Physcomitrella patens
  Intron number 2 from transcript Pp1s226_82V6.2 (locus Pp1s 226_82V6) derived from phytozome v7.0 (chr-ID scaffold_226 ; pos 409183 to 410157 reverse strand)
aaggtgattgctttgcgtttcattttacaataattgacaaatgaatctcgactttatttccaagttgttacatttacttttcctcttgatatctttttagaatatttgattttcaaaatgcaatatacaaagcttacttgaaagatatgtctgaagctccactgttattatttttagcttatatgttttaaatggattgatatcttatatcttaaatcaattcagtaggtctcaatttattgtcatgatgattgagtcagatagtcgcaagccagggtgttttgctgttttctgcatatgcaatgcagttctaaatggatggctcaaacctgcctatgttctaatccttcgtaaaaaagcagatcctgttgggcttagtccgaaagaggaagagggctcagatcaaggggagtccccgttcgtgaaagcagaggaaatcgaggatttggaagagaaaccccaagttacagttccagctgttttctgtcggccatttgaacctgtatcctttaattcacgtggaacaaatatgtttctagaagtgaacaaacggcaaataatacttgacaatgcttacaagggtttagagccagttccatctcacatgaaatgtccagaattaaattatcatccatctttttttcttaatttttcctcctggctgcaatttttcttggtatttttttttagtgtgcggtttaattgtaacatttcctaaccacatatacgacagttaaacctcaccgcatctgatgaaggtactgatcttttgatggattaatctgcatgtgcagctgtagtggttgccgcatgctctttttgatgccgacttttataatcatttctcggttaatatatgccctcagtttttatgtcattatggaatatggaaatcaactggcttcttgactgatggcttcctctttgcccttcttttcagaactggaaatccttagatccgtgtggagcgcgtgg

SEQ ID NO: 116037 - DNA, 498 bp, Physcomitrella patens
  Intron number 1 from transcript Pp1s370_45V6.1 (locus Pp1s 370_45V6) derived from phytozome v7.0 (chr-ID scaffold_370 ; pos 213656 to 214153 reverse strand)
tgggagcttcgagggttgtcgtgacgtagtgactggtagttttttgtctagtctgctgcagagtggttctgtgttctgggttgtgttgttctttttcgaggtgctgctgtgatttgaataggttattgctgtgtgttgtcatggagaggtgccgagttctttgtttgtttgagatcgtgaatgagtgttttttccttcacgtatcctcgacaacgctgtagctaagtgtgaagaaaatcgttttagaagttatggagattcttgacgaggcgagggtttgcttagctttcacagtgcgcatgcgacccgacgagcctactacagttatagaggatgtgagcagttttgcgaagttgtttgaattaatgggataaaatttgagaaggaacttgagcgatgacagatttgtcgagataatttttctccactatagttctcttaatttcatccctcgcttgtctaggcaatcgaacgttcagattattcgcatttcttgcg

SEQ ID NO: 116038 - DNA, 884 bp, Physcomitrella patens
  Intron number 1 from transcript Pp1s37_110V6.1 (locus Pp1s 37_110V6) derived from phytozome v7.0 (chr-ID scaffold_37; pos 584265 to 585148)
gggcttcgttgatcctctcactacgtcgctcgcaggtagactttttgttggagttttggccatatatacctcttgaatcaacggatacttgattgttatagaaatcacggtcccccaccgaattttacaaaagctctgggatctggacgtggagctgaattaggttaaaaatatgtgcctgcttggttatacgcagcacaatcctagttcagtatcttgtgcgccgcgtgaacatgcgcgatcgttcttgtatccttgtaaaggcgtgttagctggatggcttagcgggtgttaattcaaagctttacctactctggagatcgtgaatacgcgtcattagatcgttagtatatcttcctgtttgcaaagagaagagagaagagagaagttaattaacattcagaggaaatatcgttgtgtgaagtatggtggttattaattttcaagttttagactaatggtactcgccctaaaaagtttgctcgtgctcgatttagtatgtttcgtaatcatcagcattttaatgcctccgtcaagacgatctatagtatactggtgggacttggatcgttggatggttgcgaattcctcttttttgtctcatttgtttctttcaatttgtgttctggtggtaatcgggttgctaatgtgaacacttgacggaagccgtgaaacttgggttgtagctattgtctcctcccttggtactctttctacgtacttcgtaggtgttttgcgctttcatctttgttctctgtccattataatacgcaggtcttcaggaaaaagacacagcttgctctagtagcttctagaattttgaaactatgaagcttatgagcattcagtaagacaatgtttgttcctgctgtcaggttctgaaa

SEQ ID NO: 116039 - DNA, 765 bp, Physcomitrella patens
  Intron number 1 from transcript Pp1s44_120V6.1 (locus Pp1s 44_120V6) derived from phytozome v7.0 (chr-ID scaffold_44; pos 813185 to 813949 reverse strand)
cggtacgagcttctcactcattgtgggccctgcataattgaaggctgtcagaacaagttgaaagccctccataagaaaggaaaaaaaatagcagacggggaaaaagccactagagtcgaatggaatggaatgggacccacatcaaacctctactccccttcaaagcctttgggtgaatactactctacaactgctgctacaactagtcttctaccactacaccctcctctccaacaacattctgtaacccagcaggaaaattctggatgaaagaagttggaacaaaattattgttcatgcctggatcccacactgcctaccttggtttataattgcaacgctttttgatgagagtgagagagattgcttctcctgagcagctcacaaccacccacaaatcccatgccaacctttttgcaatagaaaaataagaacttaaagtttactgagatccagagacctttgaaagatcctgacaaatccaggcactcagtggaattaaatcaggatactagagaatcatctggtttcgttcgtgatatcaggaaggtgcattaattcagtttattttttcaaatttaaatatatgaaattttcctgtattttgcaatgcgttgtaggaaatcagggcaatggtggtatgatttagatcgcccttagtaacccacaaacaggttgtatattctgaccaaaagtctgctgtatagttttggtagaataatctccgtctgattttgcagcaaaggaggagcaacagcaatttgt

SEQ ID NO: 116040 - DNA, 955 bp, Physcomitrella patens
  Intron number 1 from transcript Pp1s471_4V6.1 (locus Pp1s4 71_4V6) derived from phytozome v7.0 (chr-ID scaffold_471; pos 15235 to 16189)
cgagtctccctagtcccgtgactctcagtcccggcgtgagttccagttcggcacaagtttctaaattctaaattgaaatttcttgaattccttcgaacttcttgaattctttgtccccatagaccaaatttgtatttactctttggtttttttattttttgatgctagacaaattctattttaaataattataacactcacgtgaaaaaatattggagtgaaatgcacttagttgcatgtgtagtgaagatccccgaatgcgaaagtattgtgttcagactcacaaccgtaaccaagtaacgtattgagggcaaggcgaagttgtgatgtgaggcgaggcgaggcgaggcgaggtgagccagactccaagctcgtaaacttggtcgcattggaggtgaacctgtgctggatcaaaattcggctgctctgtgttgatctgtttttctttcgaagtgaagttgaggcattcttggggcgatttgaatcgattttttattttatttttattgttttttggtttgttttggtttgttttgtttgttttctaaagtgagtaactgtgctccttcgttgtgtttgaggttgaagtaggagcttcaaggagagggacgttacatcgcttcgtatgttccttattaggtcaactcttgtctactccaccacatgtaaaacgttgtccaaaactctacatgcttccatgtttgtgtggtgcatggttcccaatttaattgtttcatggattgttgaaacctggtttaggattgaatttgttttgggatggaattagaagatttgacaactttttggctcaatgaacatggggtttgttttaagcctcctcatggttcttgtttttcattcactgctgcagtccctaaacctcgtacattgcataaaggaatcggccaacgtaatgacagggacggagcggtgggacggagcgtgctggtccaca

SEQ ID NO: 116041 - DNA, 358 bp, Physcomitrella patens
  Intron number 1 from transcript Pp1s156_109V6.1 (locus Pp1 s156_109V6) derived from phytozome v7.0 (chr-ID scaffold_1 56; pos 650609 to 650966)
ttgtgtattactgcgcgtcccacatattgattcaggtgggtaggttttaccatctcttcgcctttgctccacctcagtttttgtttcgtcgccctattcgtccatgtggttgcattttgttccacactccaatttgttggaattaaaatttagcgaccatctgtgcattgagttgtctcttgcctttgcaaattagaagaatgttttgaacgaattctggttcagtgttgaattatgctggacggggaaggaaattagtggtaaacctaagaagcaatataggtgtttactctgcgcgtttgattcgagcgtccattctgcaggcagcgattgcaccattgcattgcaccacgtaaat

SEQ ID NO: 116042 - DNA, 851 bp, Physcomitrella patens
  Intron number 1 from transcript Pp1s387_7V6.1 (locus Pp1s3 87_7V6) derived from phytozome v7.0 (chr-ID scaffold_387; pos 41633 to 42483)
tttttccgactgaagctctccgcactgtgcaggtatcattttgactgcgaccttgatgtatatactacatgagtttcacacatgctttcaaggcatgtattgtgagattggtgcttactgaacacagaaacattatcctagtatggtactatagccttgttgactagttagtggtccgtaatcagtttaaggtttaattttaatgtaattgtttgtcttaagttaatcatgtatcaaagtgcataagttaattcggcttcggttgtggtttcctcgtaattaatgaaggaatcttaattaaaagaaggtggcgatcttagacttacattatggtgtaccgggcgttgtgaagcattctcattcaatttcctgaacttggataccgggagggttgattaattattaattttcagactatttcttgttcgaaaacatgattagatgtacgattgcatagttccgcgaacgaatccaatctttgtcacgttcttttgatgtctggcatgcacgccttaatcctctctaaagttcctatagtgaaattacaatttaacatagaatttctataaaacgatggagatcctatttgtttcgattagtggtccattcacggtaggaaggtttagtttatacctgtcattctaggtgtggcgtacatgtcgcgttgagcaaattcgagttttactcatccactcagtaggtgatgattgtagagtgattttcaaacacaagattgttaaggattttttttttttttttttttttttttttttttttttttttcttccacactatttccatccctacattaagacgatcttgggatatggcaggactatcttgcaaattca

SEQ ID NO: 116043 - DNA, 625 bp, Physcomitrella patens
  Intron number 2 from transcript Pp1s28_391V6.1 (locus Pp1s 28_391V6) derived from phytozome v7.0 (chr-ID scaffold_28; pos 2482230 to 2482854)
cggcccttcgcctcccgtcttcagtacttcgtcaggtatttccaagtgcttaatgccgtttgtcttggcacttttccttgaattaaatctcagtattctttgcaggttcgaccttaatgtgttgtgttctagatagactgacactgttttcacaattactcgaagtgaacaaaatatcatgttatttcctttttcgggaacagtactggtcagcctttgccaagctcattgtttgcgaaatttctgaattaggttttcgagtgcagatatgcatccttgacagacatacaagtatttcagacttgttcgtttgaattactcatagtctgaatattcactgatcataacacgctaagggttggtttgtcatctcttggttgcaactagttacaaccattaacgcaaagtaacagcatacgcatttgttcgaggttgatcactacatagtgtgacacttctgaacattaccgtggagacgaagatcagtttgttgcatcacttggttttaagatcagtttttaatagcaagtttcttttgttttatactgaaaaattaatagttcctaatttggggggctttctgaaaaaaggacggacatcagcacgggagcaatttgggtcaggc

SEQ ID NO: 116044 - DNA, 803 bp, Physcomitrella patens
  Intron number 1 from transcript Pp1s33_144V6.1 (locus Pp1s 33_144V6) derived from phytozome v7.0 (chr-ID scaffold_33; pos 831628 to 832430)
ttcttgggggtcttcctcccgccctcgctgtaaacacctaactctacttgcaaacctcaggaatctttgtgcatcagtgatgaaatggttatgatcagccatgcccgaccctattgtctgttacaatgttggcggaggatcagtggtctgtgagttgtgtgaatcgatctaaattggtaattaattcctctaggcaatgcccgtcaacatttgctgcatacatttgaacagagtagttggctacattggtttgtaatacctcaaggctctctcgagtggcaagtcctggcttaaattgtcgtttctcaccagaaatgatgaagctctatcttgaaactttggcttagaaattgcatttctcagcctctgtcgataatccgaaattggattgctgggttgcatttctttcgtttcatcagccgccgtgacaggagtcaggaagattgttcagcataagctgcatcgatgtattcgtagtgtgggaagtccaaccgttttctgtaaatacggctgatcgattttatttttttatttttttctcagttcgattcatttatctttgatttgcactgacagaatcaactaatgtcacccatagatttctgatttttgggcatagttgctcatgttagtaacggggagcataatcaggttcactcaaccgtgctttataagctgcattcagaagtaccattacggatgacatgtctgcttgcatgatggattgcttgtcccaaaggttagaagagaaatatatgttaacagatttgctttcctggtcgcaggcgcgtggtcaccgcgtg

SEQ ID NO: 116045 - DNA, 556 bp, Physcomitrella patens
  Intron number 1 from transcript Pp1s191_44V6.1 (locus Pp1s 191_44V6) derived from phytozome v7.0 (chr-ID scaffold_191 ; pos 247011 to 247566 reverse strand)
tcacgcttcatacggcctggtaaggttaccttctctttggtttgccgttatcacgagctcttttctgcttcggagtgaggtctcacagtttcaaactggtcaagtgtgtgggttccgttttggtggaggtatatcatcgtaggggtttcattgataaagtagtgatcagatgtgtctaggaagtcaagaatctggactaggaggtgaatttcaacaggtgaagttttctctgatatatatacacatacacacacatatatccatgattatgtgtattagggtaaatattggatacacaattagtttcgtattttgttagtgtctgtgtccctctcaaattatcgagtcggttagacggcagtttcggagagttgcacattctatatctcttgtcacctttgatcatatcgcatttgtgtgattcagctctcttctgtttctctggtttgaatttagacgaacctacatagcatgcaactggttgtcgtttatgtaacgttctgtaagagttatacacaatcctaatactttctatcgtattattatgtagctgtcc

SEQ ID NO: 116046 - DNA, 568 bp, Physcomitrella patens
  Intron number 1 from transcript Pp1s134_54V6.1 (locus Pp1s 134_54V6) derived from phytozome v7.0 (chr-ID scaffold_134 ; pos 426149 to 426716)
aggttcacttgctgctttactgttgttgttgcatttggcttatccttgcagatacccgcaatctgaattacattggtctttttttttttttttttttttttttttttcatttttgttttacctttgaattctccagttcttcaaggattccaagtttggttttagtttttcctgcacactagcttatagcattttcaaccttatgctgagaacttaagcgtctatgatcttccaggacgccgttgaagtcaatacctctgcaatgttcccttttagtttctttgtgattagttttagcttgagtgagccgaatttcaatgacatgaaaagttaggcatgttttaaaagtgttgaagcttgctttctgtattttctaacttaaaccctaaaccctcaatcttaaaccctgaaggtcgaaagtatagaggattgagaatttcagtgttggttattgggttttttcttctcctgttcttgtgggaaggacgttgaaaactgaagattaacctaaaccgctcacttcatttgtgtagttggagctgcttgaaccggatttctacagaattgg

SEQ ID NO: 116047 - DNA, 631 bp, Physcomitrella patens
  Intron number 1 from transcript Pp1s310_52V6.2 (locus Pp1s 310_52V6) derived from phytozome v7.0 (chr-ID scaffold_310 ; pos 405575 to 406205)
ggtgtcgagacccccgttgaggtgggctcatatttagggtttaggttgattttttctgttggcatttccgtgctgttggttgtgtttttgggtatgtgataactatttagctttgagttggcacaaaatttaagtagtggataaggagattaagcagaatgtaattttttcattttgagtctgatttgggtagatcggaagcttagaactaggattctgagctagtttctttaacgctgtaaaccatcatacgatgtgaaatagttgtggaagtgctcgcgtttttgcggaatgtaaattttcaagtatataggatagagatttttctttgctaggaattgtctcatcggttcgcaaatcagcccaaaattgattgtatgggtggagtattgtgttatttcccctcgaatttcaatctaaattttccgcacgagttctttgaattggaggccctcatttttgcttcctttcgaagttaaaaacaaaacaggaaatgtagcggcttctgaattaggattaagtggtggcaacgatgttgacatatgtcgaaccagctgtgttaaaacctcgaattcgatttgttttggtatttgcagatttgagtttgtttctgtcctagtgcttttcacaa

SEQ ID NO: 116048 - DNA, 1026 bp, Physcomitrella patens
  Intron number 1 from transcript Pp1s212_60V6.2 (locus Pp1s 212_60V6) derived from phytozome v7.0 (chr-ID scaffold_212 ; pos 336898 to 337923 reverse strand)
tgaggtgaagaagaaggaggagaagaagaagaaccgtgtgagtccgtaactaggtgagatgtagtggtgttacgaattcgggtgagagggtcgatttggtttgtgtttttgtgatgtgacaaggatagtggattatgtttgagatttttggcgttttcggtgtggtttcaaccatgccgtagcgtatattcatgttttcgctgtgatgtgtagtttgggctttattttcttcaatcgcctttaatcctcggatcgtgaagtatctcgagcgactggctttcagagataatcgtgttgaagttagctgtgttggaacttttgagtgtgtgatttggtgagctggtgttctgattcttaattgcagaatttgaactcgacggcttgtaatttagacacagagaagtggtgtctgagtaatcggatcaatgacgattctatttcagttcgaattaattgatttaaagcaacgaagctagatatttctgttcaattttcaatttgttgtttggtattctttaagatatattttgaatattggttcagggtttgatgaacggtagtaggggatactgaacaggatcatctgcaatggatacaatttataaaagagtcttaatcttaagaatctgtctcatgtttgaacttatctcgaaagccgattgatttaaccagaagcgggtttatacaaattatcgatcacaagaaatgtgcacttaagggcgatttgaatgacgcaagattggttgagtgagtctcagtatagaagtgcattgaattaactttcaaagattgaatatgtgtcccatattcacggtatatatatgtttggcgccaggaatccttcactgtctggagaataagcagcgatcgtttgttattgtaagtctgagtccatgtgagaacgaaatttgaagttgaatttattcaagtcagttttcgtcaatacatagccacactagtattgatgaacggtcgctgtggattgcctcagacaatctggcggaccttgcaagacgaaggctgggc

SEQ ID NO: 116049 - DNA, 702 bp, Physcomitrella patens
  Intron number 1 from transcript Pp1s223_54V6.1 (locus Pp1s 223_54V6) derived from phytozome v7.0 (chr-ID scaffold_223 ; pos 328321 to 329022)
ctaaggtcagtttccctccgtttatggccttgtttggagctccagcgctcccctctcgtgcggatccaggctagtgtttgtcgttgcggagggatttgttgcattggattttacaggagataatcgctaggtttgtgagcacttctttctagggttttatatccgctccctgaatttttttggtgtgcctttgcgcttgtttgatagtttttttttggtgataggctaagacagagcgcctcaaccatgtttcatatacttcgttggaatggtcatggagaatgtttggggtgattgaacctgttgatagttttttcgcgatgctgtttcttttaaattgctgatgtgcagctgcattttgatttttttatagcgttactggtttgctgttcttcattctgtcttggatatgttttatcatgtttatttttttggttttatacgtgtaagggatgtgagcatgattctataatctgatatcgtcgttgaagtttcttgagatcgtcactgcgggttttgtagcattagtgatcattgtatgtgtaattcgtgaggatgatgctgatttcatttgcttgatgcattatgtacagatgatttgtacttttggaggatctctagggtttatgggctgtttatcagtctaagtgatgtagccttgtcgcaggagctggttggaatacggagcttgtattgacattg

SEQ ID NO: 116050 - DNA, 721 bp, Physcomitrella patens
  Intron number 1 from transcript Pp1s58_289V6.1 (locus Pp1s 58_289V6) derived from phytozome v7.0 (chr-ID scaffold_58; pos 1907260 to 1907980 reverse strand)
cctgccctgctttgcttcgacctgcaagcaatcaggtacgtgaatgttgcttctctcccccgtgatccgagtaacggaatgctggattaggaataacgtggtgtgttcaggatttggccccttgtggaggcagtagttgacggcaaatctgtagttaggtgttaccttctttgagcaatcgaggattggcgctttgaaaggtcatttgaatcactcttttagattgtcgctcgtagtgagatggttttttgtattttttggtagcttttttcttttcttttctttgctgcagtcgcacggcgcagaatcttccttctgtcctttttgtatagatgtggagtcgatctaccattgccgttttgtttaggagggctgtttctctatgctggtgtagatcgatgttaaagtgatagagcctgagaggcttcccgtgttgctggcactttgctctggcattctctgtgataatatgaatgtatttgttggttgtaagctgatctgtgagtttgtgagaaagaaagagcatttaaataagtgcttctttgaaactttcctaattcaaaaattcaataattgcttcgtttgataagaagcttttgcgtgcagtggtgtttggcaggttcatcaatctgtctgctcgatctgcaaatttgagtagctgttgatttctgcggaaattatttcctgttcaggttcattgttggctacacctttagcgagg

SEQ ID NO: 116051 - DNA, 898 bp, Physcomitrella patens
  Intron number 1 from transcript Pp1s151_41V6.1 (locus Pp1s 151_41V6) derived from phytozome v7.0 (chr-ID scaffold_151 ; pos 258529 to 259426 reverse strand)
tgggtgagttgcctcggatcgccgcaagtacaacattaatcaatctctgggtgtgtagtcactgcccttgtgtaaagtagctatatgatgttttgattgcaattgtaggtcctgtacgcacttgaacgaaatctgcacaccatgtgtattaattgaaataagtgtagatatgtgtgagccaagagaataggaatgatcttgctcatgtaattcgaatgcgagctgagcagacaaatctagacttgcgaatggtcggttgtttagataagttcactgatcattatttcacgtgttgaatgtcttctaaatcccattcttaacttaattctgtatgcaagcgttaaactagtgctgcaaaagcaactttagtaatgcattgaaatgcgagaagtgaagaaacaaatcacttatcacactcaactaaagccagtaaatatatacgcccaacatttgaatattttttcaagcaccctcaagtggttttagctagaaagccaggtaatggcctgacatatcctgaagtgtgaggtattattctctgcaccttaggtaaacaaaatcttgaatccgatccatttttacaaatcagttcacaagcttcagaaaacccccatttctgtagtgacattggtggaaagaagcgtggcttcaccgagttataaatcaccaaattatctaaactttagtcctaatacatgctgagccctcatcagcaccacatggccagctcgcacagtcccacccctgcaagctactctctggccggggtaacaactttgtaaacatctgcagacaccacatatatcacagacgtcaaaggatcttctaattccggctctgatgttacgcctgtagcttgcaaggtcagcgcaatcccgttccaggcgctagacgtcat

SEQ ID NO: 116052 - DNA, 677 bp, Physcomitrella patens
  Intron number 1 from transcript Pp1s12_207V6.1 (locus Pp1s 12_207V6) derived from phytozome v7.0 (chr-ID scaffold_12; pos 1218672 to 1219348 reverse strand)
cacaacaaggtgcgatctcctgaaattgagcattgttcaactattgtgcattctcttgcatgtttcaatatgatctttggcatggttatcatatgtccaggatgcacgagcaagaaaatttatttagggttttttctagtagaaactatacgtatcttttgctgagtttttcgttttggatttcagacatttcccctaattccaccctagggtcatacttgaattttgcaatgttcaccagaacttgtttttatgattaaccagaaagatgggtgatcaaattagggtttttttttttttttttttttttttccccagtttgtcccctctctttgactctcttgattagaataacctagacttgaagcttgggtatgataactcagagattctccaaggagtttctcagttgtgcgcgagcgtaaattattggttgattgttttccttgtgattccttgtgtaaatgtcaaaacatcttacctactgataagttttgatcagttatcgtttacctcttttttagcaatttttcttatcaccacctggtagcaagcatcgaaacttttctcaactaaatttctatttttctctatggctattgatagagtagttgagtggaggcaaatgattcacttttggtttgtgcaggtcctttcagtggttgggttgctgcaag

SEQ ID NO: 116053 - DNA, 597 bp, Physcomitrella patens
  Intron number 1 from transcript Pp1s100_34V6.2 (locus Pp1s 100_34V6) derived from phytozome v7.0 (chr-ID scaffold_100 ; pos 210894 to 211490 reverse strand)
ttgttaaagctcggagtacgaggccgtcacaacatgtgagttatgatgcgcttctgcttgtagtgatgctcgctcctctaaaataagaccgtacagctttacaaaatacaccttgaaagctgaaactgggaggcagctatcgatacggcgaagagaggaaaagaaactagttagagatgagatagacttcagttatagaaataatgttcggactgttgcggtagagtgacgtgtccgggataatggatgcccacggcgcatgattatctcaagattcctttcatgtcttaggacaaactgtgcatagatatgccttattctgcattccgcgtgtaacacagtttgattgctcgtcatttgtcggatgtcgaatggttcgcgccagatctctgcaaattccttctattcgcagagcacaaggtgcgggaatgcatttgttggaacaatttttttacagggattcgcttatcaagtggagataggaacgtagtttaccttagaaccgagactacatctggagcatgtcaaaagtggaactaaccttcttccggtgttctctgattgtaaaggtaggactatcggcaattggcaccggaa

SEQ ID NO: 116054 - DNA, 709 bp, Physcomitrella patens
  Intron number 1 from transcript Pp1s127_77V6.1 (locus Pp1s 127_77V6) derived from phytozome v7.0 (chr-ID scaffold_127 ; pos 505990 to 506698)
cccatttgcagacaattctgtgggctgtgcaacatgtaagcaatatggccacagttgcagtttttcttgttcttttttccttttctatgttcctttcttcattgtcttccaaacttttaggcagtgtagaatgtattgtgtgtgtgtgtgtgtgtgtgttttttatttgtttttttttttcatgttgagggcaactggagttcatctggtgtagacagtaagggagcagtgagcatcaagggccacgtgaacagatgtaggagcagcagctgcccatacattgttgttattggacagagacttagttgtaggttttcactgtgggtagtttttcctcccatcaaactttgtctgatgtgaccttacaagtgtcttggcatattaagtaataatagccagtaaaagaaacaatatgtgggtttttttagcaagtgtcaaaattgtataaggaaagagagagagagactgctgtgagtttatttatgcaaggatcattgccctggacaccaaaagccatgagcaaatgtttacatatagtcatattccttggttagttcctaaagctgaaagctgaatgtgtttttgttttttttttgttttgttttttttcaattttataatattatcataaatttggtattcttgtgtgttgattggttgtgcaagctcattagggtgttttgtaacatgaaggacatgtgcaggtggg

SEQ ID NO: 116055 - DNA, 927 bp, Physcomitrella patens
  Intron number 1 from transcript Pp1s99_12V6.1 (locus Pp1s9 9_12V6) derived from phytozome v7.0 (chr-ID scaffold_99; p os 39716 to 40642)
ataaatatgtgagcaattttctctccttatggcaatcttttcttgcagcaattgtatcgctccactttggcaatatttacgtacaatacgatatcagagggttgtactgatccccgatccatgagcttgctttgaatgcctttgtctaagaatgcatttttttttgtttctcaattttagactggagatacaaagttctcgagggtcacaaattttgcaggagctgagagctctttgtttctaatatttggggcctggctttaattcaacggatatttgcaatcaattagtaaggcgctggccagagaatacctggagtttgctgacggtggaggtcgtagaatatcttgttggaaaatgtagtgactagtcttgacgagttttagtggggatcgcagccgctcgatacttgagccttgaaaaaattctgaaattgtcctatggaaggttgtaaactttgcgcattctagttccacgtctgattctcgatgcgtatgaaactggcacaattacttcgaaaattaagctcctgtgttcggtacaagcatgcaatcgtactttaatctcggattggtgtgcttttgtggcaaaagtcgctgctctcaatgaccttttagagatgatgacgtggaattaatgtagtagtggagttttctctcctttacattaagattttgtagctgaagaatgaatttccgcacatgtttctcaagtccggtctccagtttcctgtaccatcttgttaccataatcgttcctgggaaaccagcatctgttatttagattagaagctggggaacattagtatgagatatgaacatacgaactagcaacaatcgctggtatctggcttttccagagactcttacttgcatccagtgatgtaatatgatgtcatatggtttgatggttggcagttgctgggag

SEQ ID NO: 116056 - DNA, 384 bp, Physcomitrella patens
  Intron number 1 from transcript Pp1s323_77V6.1 (locus Pp1s 323_77V6) derived from phytozome v7.0 (chr-ID scaffold_323 ; pos 416850 to 417233)
aagcgtccctgcggataggttgtcgcttcttcaaggttcgatcgcgttcctttttcttcatcggctgttgtgatgtcaacaaattgcgaattgctgttgacatgcctcagaacggaataatcgcatgatggggcagtgtttgttgttgtggtcgatattctgttgctttaagttacgattcgcgtgtgtttactcataggttctgtgaattttgagtttgctgtggtgaaatttgacagggtacggtgaacaggttttggttttgcattttgtgttttaattatcattcaattgatagtaataattttcagattgtttttctctcatcgcttacagtgttttgtgttggtaaactagagccttttgttgataaattacgatctc

SEQ ID NO: 116057 - DNA, 578 bp, Physcomitrella patens
  Intron number 1 from transcript Pp1s161_12V6.1 (locus Pp1s 161_12V6) derived from phytozome v7.0 (chr-ID scaffold_161 ; pos 73744 to 74321 reverse strand)
aaagtgctggggttagtttgccattgcctttacaggtaaattttctaattcaaaagaatgccacagttagtttcccgcttacattatgcgattagtgagcggtgtacaatgttttatgatcgacactttctttcgtgaaatcaactccgattgttgcaatcatagcttcttctgcgattgactcaagtgtcgacttcaacttgttccgaggttattgccgtcaaggtgtcgatctttggtaagcagaatgagatgagaattgcaggagagtgaacagcaatttaagcaatgattattcctcttttttaggtgtaggctcgaaatttctgtagtggacgaacccatttgtttttccttttgtcatgtcaacgtgaagcatgacacgctgcagaacaaatggatcaattcgaaagccacccattttctcatatctcatgggaatgcaaaacgaaacgcaacgcttatcaagcaaaatttatgtttcttccaatactggcactagggtttttgggatagagatattgaaagttcttgtgattgcagattctacatcctcaacatcccggcatcatatttat

SEQ ID NO: 116058 - DNA, 634 bp, Physcomitrella patens
  Intron number 1 from transcript Pp1s59_356V6.1 (locus Pp1s 59_356V6) derived from phytozome v7.0 (chr-ID scaffold_59; pos 1835207 to 1835840 reverse strand)
aacaaatcaagtaatgcttcaacttctttacttctttacttgaatttcttctatctgtccgagcagtgcttggttaccacgtatttaagcctcgtattgtagtggtgacaatgctcgagcgcggaactaggagtcttttggtcttggaatgaaatcttctgtttagatcatatagattgagtatcataaaaagcgttgtcgtgtggtcgtgtaattcggttaagttctggttataggtattttcagtgtgtagggtaactcttaagttaatgtgggcgtagtttattagaggcggaagtgtttgggtcgggtgtgtcgagctttggagtgttaatcgtgggagaagatattttgctcactttcattgagttttatttttcagtcctacttcatagttctcttcccttaagcgtgtggagttttctgaaagatcacgttgatacttccacgagccacggaactatgtatgactgaacggcgtactgttagtttctggtagagcgtagtgagcgttttgatttatggagcttgttaggtgcagcgccacactagcactgaagaagtttggtcaacctcgcgtaatgtgttactgacattgtacttgacgtactttgtttttgcagtgtggagtaca

SEQ ID NO: 116059 - DNA, 559 bp, Physcomitrella patens
  Intron number 1 from transcript Pp1s162_103V6.1 (locus Pp1 s162_103V6) derived from phytozome v7.0 (chr-ID scaffold_1 62; pos 536723 to 537281)
gcggtcttaatttttcattcttccagaaaagtgatgtaagtcttcatatcaaatacatttcagaggaggcgacttgatgtcttttgatgtggttgcaaaacttacaggaagatatattttgcaagttcccgcaagagggctgagtttttttcttgtttttgttatgtaatgtcctgtcataatagaactaggaaaaagtgtagaaatatgtccctttttaaaataaaaaaattgatattttttaatgcatctctgactcctgattgataccataagaatgtgtctgcacgcgatggtttgctaagtgtaggttattttcagtagttgcgcctcgtcacatgctagtcgtgtaggatcaatatcctatgtatgagaatctgttgcccatgtggatgtagctttatttagtacaatagatttagcaaaagttactttgacgagatttgtttaaaaggatgactatactacatgctcattttgtggtactactatccgtcttctgattgtggattttatatgtgcagaggcagacagtttctgtaggcacagtcatctggtc

SEQ ID NO: 116060 - DNA, 580 bp, Physcomitrella patens
  Intron number 1 from transcript Pp1s42_257V6.1 (locus Pp1s 42_257V6) derived from phytozome v7.0 (chr-ID scaffold_42; pos 2121992 to 2122571)
gaatagacctcagaactgctacttcaactgtcgtgagtgcgacgtcgtttgagtccgttgagaattctgaattcagtcacttcgactaatgttagggttgttttgttcctttgcggtcttcgggggtcgagtttcgcgggttttttggtggattcggaagggattcgatcttgaacgacatgctgtgcatgaatttgttagagtttctactaggtttgaaaattagaagctccagaatgatgatcgcacacgcgacctaactgaatggttggggcgacatttcactcttgatttcatgaaccatgttgaacctgtagttcgactttgtttctgaaatcggtgaattctcaattgcacacgttttgtgtctttggtcctcacaaaaatttagtgaaatagattctttttctaagaaatatacatgagttactcgcttccttactaggcgtttctccttctcccaattgtttttttatttgataattagtgttattcttttcattgtgacgttgtaacactaatgttcggccccttgtgggttgtttctgaatgcaggaagctcaagttttagcggacaaga

SEQ ID NO: 116061 - DNA, 1006 bp, Physcomitrella patens
  Intron number 1 from transcript Pp1s46_238V6.1 (locus Pp1s 46_238V6) derived from phytozome v7.0 (chr-ID scaffold_46; pos 1689934 to 1690939 reverse strand)
cgtggtcaccttccaaccttgacggttactttgtggtatcaccctcgtctcttgttgacattattttattacacctgcagtctaaaacacagacattttttggaacgttttcctaatagtcttctgatggatttgatacaaatttgaaaaattatttgtacatgtgtaccttcaacttttaaatctgattactttgtgccttaatcctgttgaaatggtttcatgtgttggtatttcgtatcatgctcgtcaggttagtctcttcccgaagcataatcggaggagaaccttgcttctttcagcttatgtttcaattttattttgtagcacttttctagagtcactctaccacgacctgcaaacgtagtgaataacctcggtcatgcaatttgatatattcagtttgccatgttttggatcttccatttgtgacaattttgtgtcaagatcagcattagtttcctaagcacttgggtgcaggatgaattggaactatgcatcttcatacaaatgcaatgtggtgtgttggaatggacagatggccacagccgaaagcgtgctgtcgttcgatctcgtccatgaaagcctactccattgaagaattaggctcgtctggaaatgattaaatcaagatacataaaagttccttgcgagtacctcaacgcccatgaaagttctctgcatcattcgagaaatggcattccgcagtctctcacatcctcgaaaattcccatacaaaccaactgtagcaggaacttccctacagttcctgctcttgctgattttaaaccgtcgatgtcaaatcatgcagatcgcaacaataaagttcaaatagcaaggctaacttacaaagtgaaccgtatctataattatatatatatatatatatatatatattagacttacgcatccaagagtatgctagatgatacaattaacatgagtaaaggaagttaaaatcaccgtatcttatgcttaattgtttccaggttgatccgagccatat

SEQ ID NO: 116062 - DNA, 905 bp, Physcomitrella patens
  Intron number 1 from transcript Pp1s72_55V6.1 (locus Pp1s7 2_55V6) derived from phytozome v7.0 (chr-ID scaffold_72; p os 280018 to 280922 reverse strand)
aaggagcgcgacgttgttgaatggttcatcccttttgttacggtcgacatcatcggtctctctgtgtcgtgtctccctatgtttttgcgagaattttaattgtaggagcgtgtaggctccgcttggaacgcttggaggagaaaaaattaatacctgcgtttgatttctgatgaaagttctaggatcttgtcattctgttggaggaatcatatcttagaaggcatttcaatgtttcctgctttgatagtgtgtttctgtcatgatattgtcgatgaactttccatctcatcatgtagctggtgaaatgtttcgcaaccagcgagatcgattcggttgaggactggttgctgcaagcgggaaatttatggcatttgtcgttttttctggagtgtttttaaatcgaaattaaatttgttttcttttcctgcttttgtttgacttttcatgtgaaagacaacagagacttggtgctggtgaatggttcaccgtaagagtgtcggcctgtggtattttccatattgtctattctagtgccccggatcttcttcgggctgagctgcgcttgattttcaatcagctgtcagaatgacatgcccactctgcgactgtcagctttgttgaatatggtaaagtgtggggccacttgttgaagccatgtacttggagtttgatattatgacatttagagatctcacgcaatatggtgcatatgcattttcgagaggatctcgttcccttcatagaagctagcccggtgctgaacatcgagaatgacgagtggttacggtagggaatcaatcagctatgcgttcataattgtattcagttcacttgttaggtgaggacagattgctgttgaatacagcaggaaagctattaatgtagagaaatcttggttgtagatc

SEQ ID NO: 116063 - DNA, 1012 bp, Physcomitrella patens
  Intron number 1 from transcript Pp1s199_32V6.2 (locus Pp1s 199_32V6) derived from phytozome v7.0 (chr-ID scaffold_199 ; pos 178803 to 179814 reverse strand)
gtttaagaaagcaacatcttcacattccaaggtgtgaaatatattgtgccttcttttcttggttgcgcaaaggtgagggttctctcatcgagggcggagaatgcatagtgtgtgtagttatcgacattttactctttattctcatgcattccatggaaccctcccgcgtataactcgacattcttaacgcttagataaggtttcatgtttacgttagagcacgtatacctcatttctgaatcgtttttgcatttccaagaaaatgagggttgggtttattggttatggcatgtcagagcaggactgccactgctctaaattttgcttaaaggagattgctgaagggatttttggtgtttaaattcggtgatctacggtgatacccttgtttgtgtggtttcatttatccaagacccttgtgtatagaaaaatagatctggtgcttcggacgatcttgtggtgtaggcgagaggagtttttcattttttcatttttatttttatgaacaagtgatagtcatttatgaatccattatagatgtttgattttgcggtttttagcaagtctctggatctgtgaaccgattgtggagcaggaacgtgccaataacgaacttccctgatgtcttatacaacaccttttattctgtacatgcgatgagtttcgaacggataaacctgtagtattgtctataggatggttatgttctagcccgtttacagtttggtatgagcagaatccttgtctaataaattttgaatgtcaggattgtatcgaagcagattccttttcacagactgcacttctgatgcaaacgatttgctatctgaaatttgctgttcggcatcagctactaaccgtttaagtaggtaacttttaaaagagagttagttgatgatttttaaaatgcactgcagatacaaattattcatttgctgctgagtactgaacctagtgcatcattatgtctcaaacaggtctccgttgctcctggaggggggtggaataagtt

SEQ ID NO: 116064 - DNA, 601 bp, Physcomitrella patens
  Intron number 1 from transcript Pp1s11_403V6.1 (locus Pp1s 11_403V6) derived from phytozome v7.0 (chr-ID scaffold_11; pos 2995604 to 2996204)
agctgccaattcaaattcccagtcaagaaagttaggtatgtggtgattttttttgtaataatttggaactgaaaaattgtacgaaggaagattttgaatgaacggacagtgaaccaaccgatatttgtaatgactctaattcgcgaaacggctgaacttgtttgtaaatggaacttgatctcctagagcgtaaatgtcctcccacattcgcggacctgttttattgacggtcttcctgctgagttccagaaacgtggtcgagtttgtagagctcatacacgctgaacgattgcttcctctctcacgaatctcgagacatgcccggtcaacagaggtcagcaagaaaagttggataggcttttagtaagcgatagaggatactgcacccttgattgagtctcaatttccatgcagaatagagactgaattggcaatgtttgatctacatcaagttcttaaaatggccagaaactcgtttttgacaataaagaatacaaataataataataataataataaataaaaaaataaaaacagaggatgaagatgatgaagtctgagaatgcttgctcaccctgtatgctactcacacaggacttgg

SEQ ID NO: 116065 - DNA, 841 bp, Physcomitrella patens
  Intron number 1 from transcript Pp1s20_176V6.2 (locus Pp1s 20_176V6) derived from phytozome v7.0 (chr-ID scaffold_20; pos 1146867 to 1147707 reverse strand)
gtctcgagaaggtcggttgtgctttttcgatcgcgtctcgtctgtttgtttttggaagattttaggattgtagtttcttcgataggaggctagtctgacgaataattggcttttaaaccaaatttgagttaataggttttttcctgcttccctcttatattttccaactttttttgaactattgtgagtgtgaatattttgaaatggtaatattttctacttgaagtaaatatcttctatccgttcatattacatctctgtatctcgataggcaggccctaaggtatatgtagggtttttgagcttttaattgttggtgatcttttatgaaagatttaggttatttttatttttaaattcaattcccttctctcggctgtataggttgtaccttttttttgaggttgattgaagttttgattataatgagattataattgagtaaattctttttagtcttaataccaataacttctcaggtttagccggttggttggaaaaacaatgattttggttgggacaacgtgaaagagttaacaataaataaaacctgtaaatctagcgacccactaaaacttcgtagtgccgctgattattgaaagcgctacaaggttgtggtggatgtgtcggtaatttttggagaaaacttaagtatcatcggtcttcaagcggctcgaattgtctacgaagagctttgcattccagtaagcttctcttagtctacgaggacgatggttttggggtggttgcagagggctatgcttagcgtctttgccgcataggagtgttgatgtttggtttcggttttgcagtgtttttctccttcttcatacgacagagg

SEQ ID NO: 116066 - DNA, 413 bp, Physcomitrella patens
  Intron number 2 from transcript Pp1s141_129V6.1 (locus Pp1 s141_129V6) derived from phytozome v7.0 (chr-ID scaffold_1 41; pos 921964 to 922376 reverse strand)
taggtccacaaacctctgcttcagaatctatttcggtatttccgtttcccataactctcccccagtttgaagtttatttttcttctatttgaagacaattattcgtctcaagaaaacggttaattgtttcagtgcattaaacgctggattctaataggttgtatggaggccttggacatctatcaccgtgcatcttggaattcaaaatggaagaaaatataataaaagtaacaaaagaaaaaaatataggagattaaacgatttttgagtcacagtgatgtttgcttttgttccgaatcgcattttgatatcatcttaccagcgattcgttcatcgacaagatcactcatcaatgtgaaggccttggttttcgataaggtgagttcactggagcgagaggcaccactgcctgg

SEQ ID NO: 116067 - DNA, 532 bp, Physcomitrella patens
  Intron number 1 from transcript Pp1s80_129V6.1 (locus Pp1s 80_129V6) derived from phytozome v7.0 (chr-ID scaffold_80; pos 860165 to 860696 reverse strand)
aagtgagccaatcgagtgagcctactactggcaaggtgccgcttgatcactagattctacgagtctgaaatttgtggcattttggtgacaagttgaactcatttggattacagattgcgagaaataggtgtgagatgtacgtgtaactattgtcctgaaaagaataacaaacaaaatttctgctctgcttctacatgtattaggtcttacttttatttactgtctgttacttcaaattcacatcattatttgcggtggggctagctggatttctgtaggaatcgattgctcctgatttttcattttgtgagatgattattgcagcacataggcaactttggggtacagagggcaagtatggtatggtatgcttgttcatccgcttgtggtcgaaattcccctcccgttgctcccgattatcgggccttttctgttgggcagctattccataatcacacattacagagctgtgatgtaatcaaagcttatgcgttgttgcaggattttattccagcaggttcaggctttgaag

SEQ ID NO: 116068 - DNA, 1056 bp, Physcomitrella patens; identical to SEQ ID NO: 114928
  Intron number 1 from transcript Pp1s391_1V6.2 (locus Pp1s3 91_1V6) derived from phytozome v7.0 (chr-ID scaffold_391; pos 10172 to 11227 reverse strand)

SEQ ID NO: 116069 - DNA, 281 bp, Physcomitrella patens
  Intron number 1 from transcript Pp1s222_25V6.1 (locus Pp1s 222_25V6) derived from phytozome v7.0 (chr-ID scaffold_222 ; pos 89214 to 89494 reverse strand)
cagggcggttgacatttccgatcgcgttgaagcaggtgtgtgagagagagaggaatagagagaggaaaaagtgtgtgaagagtgagggatgactgtggatatgttgacaatgccttagacagtttgattgataatctgttttttttttttttttttttttttttttttaatgcgtagttttcaagcatgtcactaacgtctgtctctgatacgcttttcaattttcttagcgtcgtttttctttgcctgttgcagcccgggcctcgagaaaacactgtaca

SEQ ID NO: 116070 - DNA, 888 bp, Physcomitrella patens
  Intron number 1 from transcript Pp1s85_103V6.1 (locus Pp1s 85_103V6) derived from phytozome v7.0 (chr-ID scaffold_85; pos 607932 to 608819)
aagagattcggctcaagtgcgagaatcggaaagaagtaagacagctaattttcttccctctagagttgtagtagcctacaatccccttccgatgcttagtgtgcagtcagtttttttagagggatgtgagtgaaaggcaagaggtagcgtgggcgggtgtcatttttcatgctcgaatgcagtttgttcttaagagagaaatgattcttcttcatcggcagctgtgtgattttatcattgagggtgaacgaagcgcaagtacattcatagctggccgagaattggtcgcagcccctttggaagcattgaatgtgtgtaagcagattggacaagtggtctgtttacttggattatcgtagtcttcaagaccgctggtatgggcagggcgtgaatgatgtagaatcaatggttattggagtctgggcgtgttgagaactttaactactaatatatctcatagaaggatttgttagtgttctgaggaggatgcgtggcagccgagcgcatattactgttcacaaatggaagtttcggatgtgtgtctcatcaaacccaattttcatacctaataagggtctacatcttagttcatagaatatgctacgagaatatgtgtcgtcagtcctgggtttaaagaatgcgtttccccttgtgaacctccatctctccgtttttttgactgtcgatgtgctgaatcatgagaattacatcatcattagttgtgattcctacgccaaatgcaatattgtcatgcatgagtaaaatactgtactatagagggtttgtgcttttggaatgtacttttggaagcaattctagctgtgtagtgtcagagctctacgtttgatgttggaaacatctgtttcaatttcacaattgcaggtattc

SEQ ID NO: 116071 - DNA, 774 bp, Physcomitrella patens
  Intron number 1 from transcript Pp1s316_8V6.1 (locus Pp1s3 16_8V6) derived from phytozome v7.0 (chr-ID scaffold_316; pos 83473 to 84246)
agcaactctgctgatttgtgctgtgacggcatcgggtgagcctcgagcatctcttccaggcagtacactccacgtcttcagctcgcttgattcctcgctggagcgctgggctggcatttttctgagctgtggtttggtttgcagctgttctgttgtctgtgaatgtagagcatgcgaggcaatatcttttccacagtggaatttgtgggtgggcgagggtggatactgggataattggggcgtttgtttttatttgatttcttttctttccataatgtgtgtgcttgtttggctcgtgggctcaggccattagatgtttttgtttttacaatggaaacgcatggagagctaacttctgctgcattgagcttggtggttgtgggatgagtattggtagcgttgggtgcaccgtggagtgttagggttgtacgtcatgttctccttgggataatgctgctcctattttgtggttgtagcgatgtgagttggattgtgcagtcttgatttgaaagtttgattaacccagctttaggtcgatttctacacattcagtatccatgatagcatgtgggcgtcatctgtcattacccagccctgatcctctcatgtgcatctgtttgatggcttattattctgttgatgaagataatgtgtcaaggttgtgccttatagacagcataaaacactttgtactcaacacaattgtcactgccgctgacgccgtgtcgttttggaacagacccgtttaatcatctcagctttcattgctactcc

SEQ ID NO: 116072 - DNA, 1068 bp, Physcomitrella patens
  Intron number 2 from transcript Pp1s339_2V6.1 (locus Pp1s3 39_2V6) derived from phytozome v7.0 (chr-ID scaffold_339; pos 7281 to 8348)
ggcaacgggtttggcccacgatcggggccttccaggtgatgcatttactttcgcgctgcttcaacttcgtcttcttgttcaaaccgcagacatgggccattttgcgaagaaacgttgtggacttcctggaaaactcgaagtgtctggtttggaaaaggacagaaatgttgcggggcttgatatgaagtttgaagacagaaggtttggttggcgttgcacgaatggcattttggagagaacggatggattattatacattggattggtctgaaggatggaaagtgaagttttgggttgtgttggaggaatgtcatgtgggggagaactggagggttgttgtcacttgggttgtgtgggaatgtgggcagaggtaccggatgaagggtgtgaagggtgtgaagggtgtgaagggcgtgatagagtgtggagataagaaggggatattttgtatgatgagatggtgaagtagagaaatggttgtggagtagttgaagcggggttgtgtgaatgttgaggtggaagtggagtgtggtgtgacatgactgaagtgttgaagtttgttaaacttttgggaaaagtagttggtggtggtggtggtggtggttcgatgggtagtggcctttttaaaataaaacaaaacccatccgagttccgcgcagcagttaattcacgggatttacgcagacatcccatgtcttattgcttcgcggtatctatagtcgacaatttgaggattgcgggccatgcttctcactttgaacatggcgagggccacaggctgcactgggggaactcaattaggagtggatgtggttcagcttaaaaccatcttcttctttatatatttatgtttatttgaaggattttagagtgagaaagtctccatgttttttcaactcattctcagttcttggaatggtagtttatgctcgtatggttcgtgtgatgtgacaaatgcgttgttaggctttagattaggttatgatcatactattcggatcaagagttttgatactatattgtttccttacaggggggcagctccagaattgtgtaacaactgtaggc

SEQ ID NO: 116073 - DNA, 825 bp, Physcomitrella patens
  Intron number 1 from transcript Pp1s36_183V6.1 (locus Pp1s 36_183V6) derived from phytozome v7.0 (chr-ID scaffold_36; pos 1094604 to 1095428 reverse strand)
tagcgtatactgtaagtttgttcgcccctaatttctgctactgttgcaccaatttgtgactccgcaaggtatcgggtatagctcttagcacgtaatttttgaaacttgacgagtttagaagaacaactctacttacaaaaaacaaatataaattgaaaaatgaagttccttttctataagagtactgtagccttgagatcctttacgcagattttgataaagtggtgatactcgagtaattctgtgtgcattttttggtgagagctcgtgcaagaattcagttcagagggctttcatttttgtagggtttggtctgaagtcttggtaaagtggattttaggtttataatttaacgcgcactgtttgcggtttatgttgacacggatcgcatcgcattgccatggctgtgattttgattagtggtcggtgacacaacacgggtcttgtttctcaatttatgtggcatttcgaaagagttctatttctagtgtccatcgtccattcacacgtatttggtatttcgaaactatacgtgtttctgtgtctgatgaacattagagagacaatcgacgggcccatgaggaagtttgattcgtacattagctttcatattaggatcacactatgagaacccaattttttcatagttttcagtgagatcatcagtgacgtaaatttcacaaatggaaagcatgtttggagagtttataagacagaaaaatgatttccgttatagggttacgaagcagatgtcttagtttaattgttcccatttatatgcattgttcaaagcgattcgtgttcgtgagtgcaggatattggtgg

SEQ ID NO: 116074 - DNA, 1027 bp, Physcomitrella patens
  Intron number 2 from transcript Pp1s89_139V6.1 (locus Pp1s 89_139V6) derived from phytozome v7.0 (chr-ID scaffold_89; pos 762991 to 764017)
gtgagcttcgttaacagccttttggtaacctacaggtgtgactgtgatttcgtggtacttttggtgtggagtgtggagtgtttgcgtataattaatttttgcttgctatatgattccaatggattactagtggtcttgcgtaggatagtaggccgtgttcgcaatgaggcaccagtcaggttgtgaatgattggccctgtttcatggatgcaacaatgccctagtatagattcaaactgcaaacgtgaattctgcggacctgactagttttagtcgctcgttcgttttgcttgattctgtggccgctcacaccttactttttgggctctagttcttgtcattgaagtagttttgctgtttttatttatctatttatttattaccttcttcttctctctgcttgggtgggattttggacttagtttggccaaagatgtggccaacatttcatgatccttacaaatcttcaccgtccgtcattgttctcatcgtaaaattctaggtgccatttcaattgagttgtacttggaactggataatgtactaaagttactcacacttatcttaaatttctgtatcgtcttcaattcctgttgaacattcccctgattaatgatgcatcttccttatgtttgattgtggagcttcatatgtaacgtattttgaacgatttttggttggtcgttataagaaaacgatttgcaatgtaggtttctgtactcctagaatcattaaatctgttcgctcacatatagttcataatgaggaggtttatattaatgatggtgaatcttggtgcaacgatttgaaaacccgaagatatcttggtctctttgaacgaaagtctaagttgatgattgggataaaaacagcagcatcttgacaccatgcaatccgcaaggacatgttcatgaatgtctttgtggttactcttaatttatcatattgtgctttctttaaattgaatgacttaagatagtgttgtactgcaggtagtttgtgatcatttgtaacaagcttggaaggt

SEQ ID NO: 116075 - DNA, 930 bp, Physcomitrella patens
  Intron number 1 from transcript Pp1s16_367V6.1 (locus Pp1s 16_367V6) derived from phytozome v7.0 (chr-ID scaffold_16; pos 2592168 to 2593097 reverse strand)
tgagggagtcgaggtttcttgcctctgctgctgcggtaaggattccagccttggtggcgagaagtggaggttgtcgatggatttggtgtgtagatctgagggaacgtgaaaggatttcgctttgctggactgctgaagcctctctcacgtttgcttttctgtagtaatttggagattgtggacgtcatccaatccttaggtgtgtgtgtgtgtgtagattttacagtggaagtgggggattgatgtaaaattctctttgtgtccgtttttgttgacagtctgttttctgtttggtccttgatcgtcttttgcgcgtttcaaggtttgcgttcgtgtcaccgtgatcattattctgtctagtcattgtagaaaagtattttcgggccaaggattgtagccgaatggtcacttttcccctcgtgtcactttctatccagtccctttttctgcctccaagatgctttgtgtgagtggctgcagaccatcggaagctctaatcaaacctcacatgtcacgattgcttgtttttcccggcgctgtctacatccagacaacgatgtgacagtcactgaagtgagggagtttgtgcagccctacattcttcatcgtgagtgtaggatctcacaagagcagaatgtttcctattaccgagaatgttgagagaaatgactgctaagtacttgactgacgaggctttttgttttcgttgcagttgtggatcccgctccgttgaaatcatttcgaacttccttctcgttctgggacgctttccgggattgtattgcggtaacgtcatagatggtggcgcagaggagtttgattctctgtgatgggatcttgatttggggatatagctgtctttaggactttgccgcgctcacgcgggatttttatcagtttagtgttcgcctcagggcaagcgaatccatc

SEQ ID NO: 116076 - DNA, 917 bp, Physcomitrella patens
  Intron number 1 from transcript Pp1s101_73V6.1 (locus Pp1s 101_73V6) derived from phytozome v7.0 (chr-ID scaffold_101 ; pos 357868 to 358784)
tatcgagcgattgtggagtggaagctcatcttgaggtatattttcattctagaatcttgactgtgataaaggatttcattacacgtagaaatcttggaggggaatcggaggggcaatcacattttgttttgtttcgttttgatgttttttgtatttcctcgattttccccgttttctgggtcaagagggcacgattctgtttctgcgttagtggtactggatcatttcgttttctgttcataggttgcggtcgagaaggacacaactatatcccctcaatcaatccgattcgtccttcaggacttatgagactgacggcttttccgattctgtttattcttaaagacctcttacactggttgaatctgtgcttcaaatatttgaaatcgatttcaagacaggacgggtatgtttgtgtttaataaatgtcctagacacgagcgattccttcggtgcatttaacttcaaatcggttcaaactcttacgagtgaatgtttttgcatgacaccctagttctcaaagttcttgtctctccttatgcgctttcacttgtatcccaggtggactttattttgatatgtgtgaaatggaaatcaacaactggatccgtgcactctgcataacagattatcagcaaagagccttcaccaggaaaaaaaaaaaaaaaaaaaaaaactaaaacgaccttatgccgcattgttaaagggttgccagcgaacccaacagtctagcttctaggcgtattctgtgcaccactaaatcagagggcggctggagtattggacttttggtcgaatcggagaagaagtgtagggtggttagaattcagggggagctttcgattgtggtggagagatcattgaatttttgctcatggtaacatgtgaagcagttgggagaacaggtcatcttgttg

SEQ ID NO: 116077 - DNA, 974 bp, Physcomitrella patens
  Intron number 1 from transcript Pp1s59_53V6.3 (locus Pp1s5 9_53V6) derived from phytozome v7.0 (chr-ID scaffold_59; p os 187908 to 188881 reverse strand)
gtgagtgtgacagaagtccggccatttcacaagaggtttcaaattctgtgcctttctattatgacgccgtactttttttgaatatggtatgatgatctgcggcatatttttttagaggctttgcttatattggccaggggaagaggagattgcttcgcttggtgtgcgttggtgtaacccaagcaaatcgtggcgaggaacctattttcaaagtagttccatgttgtcttgtcgattagctaagagttttattgaatttctctagttcgatccgccactactcgcatatgatgctcaagaaattattgcacctctcgttatacttttcatgtgattcaaatctgcaattaacttgtaaccttgtgaggtcaacatgttagacaaccattacttacctgcattttgacctctactcaaatgagaggatgattcccgttaggcaggactggatgtctgtcattgacaggggttagtttgaatcgaatgaggcgctcctttgcagccgatgaaggtctgctctaattcagttgaggttatatttgtggtagcgattgtagaacctgaacactggacgatccatacattttcgatgcaggatgttcaaaattgtaccaagtttttgtttcttattcatgatagtcgtttggttttgattgaggaatgagacgattgacaaatcattgtaggttttgggacacgagggtaaatttacaaatttgtcgttgaacggtcgttgtcatggagttgagactgaccttatcaattttctacttcaaacagagtcccacaaaactgaacataagaacgccctcattgaaaatctaattgccatgaaattcaggcacgaaatatttcatggcatctagattggcatagtatcttttgtttgaatgtacaagcatttttactggtgcattgatctttctcaagtcactgtcttcatgagagctgctactgtaaaattgcaacagggt

SEQ ID NO: 116078 - DNA, 690 bp, Physcomitrella patens
  Intron number 2 from transcript Pp1s79_69V6.1 (locus Pp1s7 9_69V6) derived from phytozome v7.0 (chr-ID scaffold_79; p os 400715 to 401404)
gattttgtttctattctcccagcgctgaatcagaggtttgttctcgtattcttcgagttcttcagttgtggattgcgggtcttgacccattcgagtgaggtgattgtacaatcaaattcactgaatgtcagtcattttattctattttcttggggtttttttaaggtttttctccgtcgcgcgagcaccgggacgcgacgatcatttaggcgcagtgcagcttgatgttttattttttctgcaaaagtgttcaaattttttcagcgagtatgctgaaattaggacttatgtttgatcccttgggtattacctctcgtagcgttgaatagctcgccaattatgttcatcagtcccctttgtttttttcttgaagcaatagatttaaattgcaactcgtttgaacattggtagtaagacaacatctctctcagccaagccagacgcaatgctgctaagttttcacatgtttgggagcttttagaaggaataaatttgagattttagggatatgatcgtatcgagagttcgatgttttgaattttactttgtatcgccccagtaatgagaccatgactgtattgtatagctttctctttgaaatcttcttaagtctggtgctttgcgtttgtgctttagtgtatctactggttctgagtgttggttgaaatggttgccttcagtttgaggcac

SEQ ID NO: 116079 - DNA, 716 bp, Physcomitrella patens
  Intron number 1 from transcript Pp1s72_337V6.1 (locus Pp1s 72_337V6) derived from phytozome v7.0 (chr-ID scaffold_72; pos 1707466 to 1708181 reverse strand)
caagctgaaggtgagatctacttaatcctcccatttgttgtcaagtggtagcaaggaatgctactatctacatggccggacctatggggatgttcttcgcagcttttcttcgaaactagtgagggttggaagctttggtacccaagtctgtaaaaaattaaaaaaatgaaagagtaggaagaagaagacagacgggaaagaagaaacgaccaggggtggacaaggtggtggaaaaaagaagagtcgcttttggtaggtaaagtttggagattaggaggagagagaaatagagggggggggggaccttagcatgcagtgctcatgaaaccctgcacctgaccaaagtgagggctgtgaggatgaaaaggccaagattctcttagatacttgattctgtgaataagcttcgtagcaccctggcctcactttgatagcatgaacagcatcaaaggggccttgttctgtgtgccaacaggactgcagacaaagccctcctatagtcgacttttgaaggcctcgaggaatatatgattgtagaaaaaagctggactttttctccttttaaaaaaaatttcctccttttctgggttgaacttcaagactatcctcacctaggcttttcagtaaccccagtgcatcatcagcatgttttgcagtgaactacttgattgagttctgttgcttgtgcttgtgcttgtgtattgtggtcgctggag

SEQ ID NO: 116080 - DNA, 913 bp, Physcomitrella patens
  Intron number 1 from transcript Pp1s60_281V6.1 (locus Pp1s 60_281V6) derived from phytozome v7.0 (chr-ID scaffold_60; pos 1675400 to 1676312)
caggtaaccagtgaaaaaaaaggctagctaaattatgcatgggatgctcgtcttgagcaagatcacaatgtgtaggcgatgatgttcgtaacatatggggcttccttctacctcgtgatgctcatctggcaagaattagttttggccttgaaatgctgagtgataagaactttactttcattggtaccttaggactgagagtttctgattgttttgcagacctagaaatccttgttttgcctactcgttctgtcgggtttgatttcacctagtccagcgcgttcattcctgttttgggttgaatcctttaatgccaaatcaaaactgatcaacacatgctcgtcttggtatcgtcgtcatattgatcaggcggactcagagctgtatgacctcagaaaaagagtcgcgtctcagacttcctcacagcatgtcccgcaatttcaggttcgacgtgaattgtcttgccttagtcacataagcccaagtatcagacgaatttcaatggttgaagcatgaaaacatagcggttgcaagcaaatgagttgttcttttcagtctttagggattcggaattgttaagtgtactccaggcgtttatctagtgagaagttcttggatataccttgttagacgaattgggcttcggtttgttagtagtttagttatgttagatttatttttacaacccttaaacaattgtggatttatctttaatgtgactcaacatagaagttttggtgttgagccatagacaagctacgttgatgcatttgatgggtgattttgcactctaatcctggatgcatcgaatgaagatgtatataaatgggtttgttttgaatccttttcgtttactcctgaaatactgactcgtgcagcaaagggagctggagcgcctgtctttggagctgac

SEQ ID NO: 116081 - DNA, 573 bp, Physcomitrella patens
  Intron number 4 from transcript Pp1s141_110V6.1 (locus Pp1 s141_110V6) derived from phytozome v7.0 (chr-ID scaffold_1 41; pos 809236 to 809808 reverse strand)
gatagtcaggccaggttagcatgagtccttcacacactcacagtctacgaacaaaatgggagagaacccgtcaagaggagatccgtaactgattgcagccccgcattaagacactctttgtcttttggaatagagagaagtcatttcataacaacgtaatctgtatatgcagtagaagtagaataatatgtgacttgatgttcattggtttgattggttattcattgaatcaatgctttactgtgagttaatgctcgggatccagtctctttgatcagtcggtaactttgtctcaaaacacctcacatgaatgagaaccttgcacgcctgcgagtcgttctacacaactctctcaaagccagtatttttcatcttcgccttcctgcgacttccattcaaatagttgacatctaattgagtttaattttttgtggacatttttagtccatctcaactctgttgaaggatagcttctgagaatcacccaataaactaactgacagaaacagtgtacaaagcttaaccagatttttttttcttttttttacttttcgtttcctgcccccagtaaag

SEQ ID NO: 116082 - DNA, 844 bp, Physcomitrella patens
  Intron number 1 from transcript Pp1s424_28V6.1 (locus Pp1s 424_28V6) derived from phytozome v7.0 (chr-ID scaffold_424 ; pos 179290 to 180133)
aggtacgtttattgcccttctttcttagcccaattggggttgcaaatagtctcgtggactgctagaacggagggggagagcttgtggtgtgtgagacaagcgatcgggattctggttttgcagtttcgggagaggatttcgttttttcttttcttttcttttcttttctttcctttgtaatatttctctatttcgcatgaattcaaaggtagcttacttggttgtagatgttcatggtggtggaaactaggggttccatgggtcggaagcgttggatttgtattctatcgtatttttccactcgagggcgatgcgtgcgtcgcttgaattacagatcggtgtagtttgtgtgtatgtttttttttgtgtttttttttaaatctcccgctacatatccttgaagcatcaataattagctggaggcatattgcggggacctcagaaaagtggtcttcgaacacctagaagctcagtttttgtaggattttgttgaggaattgtcacatcctgggatgttttcagagagtagggttaggattttgttcagtagcatggcttacggggaaagcatctccttgtggcctaaatggggcgcaagctccattatgattgaaaggagttttacagttgcggtcccttacaggattcagactgagtaggtgtacgtcgactcatgctggctccttgcatgggatgaacctcaattctggaaacctaatacctgtttagcggcgttcccacgtagactatgcaaatcatatttataatatgctggaattgattactcaatttgctcaattaatatgcaggggtggacagcaacaacaacagcaacaacaacaag

SEQ ID NO: 116083 - DNA, 698 bp, Physcomitrella patens
  Intron number 1 from transcript Pp1s11_51V6.1 (locus Pp1s1 1_51V6) derived from phytozome v7.0 (chr-ID scaffold_11; p os 379218 to 379915)
tgccgggagaagtgcacttgctcaagttcattcaggtggtgtttgggttgttgtgcaaaattctttttgagcatggggttggtttttgggtggcttttcttttagttgagtgttgcagcgattttgttgacgttaatggagggttgtcatggactcttttgtggtgcattttctaggatgaacaaacctataattgtcctctcgatgtctttggtgggttacttttcttaacaaaaagaaatcggtctagtttggtcagctcttatctgatctgtctcttggtctcggaaagggttattactggacttttttgacatgaattttgctgccattttttttgaatcagtttttcctcttgagatcttcaatatcgaaacaattcttttgtggaatgcgtgcatggcatttttgctgcgagtcctaatatggatttgatgtcttgtattttccttcaaatgaatagctatctgtgaatttcttcgttatgtgtctagtgatttaatttatttttttacttatttttttctttcgcatcacagttcactgttctggtttcatcgactcgctttttgtgtttcattggacttgtgagaactgctgtttctttcgacttccactgcaaagaatgggttgctttgaatttccttgtgttgataatcatctggtatgattcctaagttgtgtccctgcatttgcag

SEQ ID NO: 116084 - DNA, 362 bp, Physcomitrella patens
  Intron number 2 from transcript Pp1s369_18V6.1 (locus Pp1s 369_18V6) derived from phytozome v7.0 (chr-ID scaffold_369 ; pos 81316 to 81677 reverse strand)
gaggaaaccattgcagcgcttggaggctctcgaaggtttggctcggatacttttctttctttcttcttccctttctttttctccccaattagttcgtctttaatttattaactacgttcttgtttctactgtttttcgattttcctttgtaatttggtggagattgtatcatgctgatcacgattttaattcacgagcagattcagaactcatttcatgttaacgctggtctgttgtgaggttctgtattatcttaatacgttcaatgctttttcattttgaggttttgcttaacccaggcttttcttacttttgatcatcaattaggactgcgaggtggcgatctttggttgccggagcaa

SEQ ID NO: 116085 - DNA, 790 bp, Physcomitrella patens
  Intron number 1 from transcript Pp1s6_431V6.1 (locus Pp1s6 _431V6) derived from phytozome v7.0 (chr-ID scaffold_6; po s 3596272 to 3597061 reverse strand)
gtgaaggcattggagaacgaaaatattaagtaagtgatattttcagagtgtgttgtatatgagatgttgagtaatccaatacaattgaggttgtgttggtcctttgttagttccatcgcagtttttatttctcagattgtttgaatgacggtagatttcacttcgctaaatgagccgcgtgcaaggtactgatgcttgtgtgagcgttgttttgtgtttgcgagaatttgaatgtgcgaagggttaatctgtagctcttacttttagggatttatttatttatttatttatttatactttgttgcttgtgacatcattcttcgaagctcatgcattcagtttctttgatttgcatgcaatatggaaacgaaaggggctcagaatactgacgtctactgcctttgacatttaacctgatttaagttttcagaatgttctgcagacaaacttaatatttcttgtatttcgttaacaattcttataaacgcacagaagagtgacccgtcaggaaattttgattatattttagcccgctttggaggttgcattttgtacgaaagcatcgccacctagttgagtttaacgtcatgtgttcatggaatggttgtccattgttggttgataccgcatgaataccaacgtcgatgtgtgtttaccaatatggcccatcagtgtggttgtcaaaactgaatgccaccttttgtggatgcctggcaactccgtggtggaaactattctaattttgtgatgagcagatacatatttggaataccaggagaggagaatctgg

SEQ ID NO: 116086 - DNA, 855 bp, Physcomitrella patens
  Intron number 1 from transcript Pp1s260_46V6.1 (locus Pp1s 260_46V6) derived from phytozome v7.0 (chr-ID scaffold_260 ; pos 429709 to 430563)
accggcagatcacccaacacgtcggcactcgcgtcattgtcacattcttttctgatactccaacacttcccctgcgcaactgctcgcagtatttgagaattgaaatcttgtgttctttcaccatggtcagtcatcaacgtcctacttggcagacttccactgcatctattaaatgcgatttcttagcaaactgttgctactagttacaggcacttcgcaccaattccaacgccaagtatttagatagccacttcttctttgtgaaactgaaaagtggaatggacaacaaaacgaatatttacgtaggatcatgagatgtttaacacccagaagagcactgaagctcgttagcagttatccgcagtctgcactatgcaatgacagcataaccatgtccaaaccttctacgattaagacagaaaggacatgcaagtgctgtcacatagacagatgtaagcaaatggctggagcgagctcctttctggtcagatggaacaccaactctgcaggaattactatgttgcatttaaaacgagggtgctctgaaaattgcaggaagagataatttatgaccatcttcatgtgcttgagatgaacattctttagaaatcatacagttatctgatcagacattaatgcctctgtatgatttgtaggctgggactggaaacaatgcctaattgcatgagaaatgcatcagaaagaagaaactgactgaaaatcaaatgatatgttaaacaatgagtttcttctgtcttaaagcagtgcaaaaactattgcgaatttagggttattattagtgtttcattgtataataatagtgacaaataatgttgcagattcaagcatcatcag

SEQ ID NO: 116087 - DNA, 966 bp, Physcomitrella patens
  Intron number 1 from transcript Pp1s335_62V6.1 (locus Pp1s 335_62V6) derived from phytozome v7.0 (chr-ID scaffold_335 ; pos 272822 to 273787 reverse strand)
gacttgttgcacttgaaggtgagcgtggtcagtgttcttcatttgtgttttttccaattgttgcatgaaaggctgagcttttctcttttgagggagaatgctttgatgctggtagttttttgtgttgttttttcacacatattcaaaccaccaatgtttaatattaagttctacatatgattttgaacaaatagttatttgaaaatgatcttttgagtattgtgttagcattagtgaatgtggcacttggttgatgacaacagttctgaaacgatatcataatttttttaaatctaattgttcatggaattagttggatgtaattaacaacgtgtggttaagtttgttttgttttgtttttgtttttgtttattttttccgattttcgtattgatagtgttccatatgatttgaatttgaatcttttcaaagaatcctgaatttcttttggaaagttcatgtgatctgtaagatgtgggtaatttcttttgaaaaagcacatagaatgtgtacttttttcgaaaaagtagtccaatcgtcgaataagggtaaaatatatcttacaatttccaatgcacaactttatttcttacagaaattcaatgcctcaatgattcactgaaaagattccatataccccaccgaaaagggcatcaaaccagaaaacatttgttgtctgatttgaacaacattaataacaataacagtaaagcatcacacaagctgaatagtaagacgaaacaagcaacacgcgccacccaaataccacgatgacagttttttcgtatcgtttacactgtctgcgttgttattcacggtttttcaaggatgttgacaagtgaagaaacgaaacaatgaggtaccgcagatgaaggactagtcggctctcgcttgtgtctaaaatgcgaattacccatgtctgtgtctgaagagcccggaaccagcagctcccagtgtgagctttca

SEQ ID NO: 116088 - DNA, 909 bp, Physcomitrella patens
  Intron number 1 from transcript Pp1s136_112V6.1 (locus Pp1 s136_112V6) derived from phytozome v7.0 (chr-ID scaffold_1 36; pos 699638 to 700546)
caagagaagccgcggtaaattaggttttgaatttatctcgagagttggaaggattcgccttgcgtggttggactaggggttaaggatttcttgcttctctttttaatcgtgtttttatttatttctttacttctttcttcctagattttcgtggtgacggagtagattctagtctcattatccttcttcctcgtctgcaggctcctctcgtggtaagagcgtagtgtctaaattagtcagtgatttgaattctcaattagagaatcagaggtcgagtttaatcgaaggcgtgttaccttgtccattctttttggtttcatggtggaaggaggttaccgtttggtagtgtaggaatgtggacagagaatgtctttgttttaggtactgaagcagactgcagacgcagttcttgcaggcaggagagtagtttgtgttgaattctaaaattatttggcagtagtgtgcttagaatggaattttatgtacctggtaatttacggtttcgcttactagtggtgcacctccaggcaaccttcgatacatgtgttagataggtcaaacgattaaatgatttgacaggttgttaagcggagaattggcacgctggtgttgagtatcgtggataaacacggttttttcaattttcatcgtacagagaaaattccgaaaatacgtgtgaaacgaccttagcatgttttacagatatgcatgtatgtcatggtgaaatggctgagatcatggttagagacgcctgaattatttgcagtttcgtttgcgtcttgaagttttagaacctgggcggaggttgagggtatttgcaacttcaggaagggaactttcaaaaaagaagaagaaacagggactctgctgtattatgcaagtaaagtgaacgtatcaattttgaagcat

SEQ ID NO: 116089 - DNA, 375 bp, Physcomitrella patens; identical to SEQ ID NO: 114109
  Intron number 1 from transcript Pp1s241_135V6.1 (locus Pp1 s241_135V6) derived from phytozome v7.0 (chr-ID scaffold_2 41; pos 682875 to 683249)

SEQ ID NO: 116090 - DNA, 692 bp, Physcomitrella patens
  Intron number 1 from transcript Pp1s49_136V6.1 (locus Pp1s 49_136V6) derived from phytozome v7.0 (chr-ID scaffold_49; pos 1185974 to 1186665 reverse strand)
tccaaaaccaccggctgggtcgaagcaacgaagaggtcattgctgtttaacgccccaaacctgactcacattattaattgagaatgcctggagtttctttgtaatatcattttcctccgcttactcgtatttactctcctgcaagatctgtttgcaaccactgtttctatcttatttgcacagtgcttaagtgggtggcaattgttttgaagctctggaggcgcaaaacaattttgaatttgataatacattttcaatctacagtcttctccatcattctgcttaaatggttttcattcttgatcttcaaccaagttgtgataatacaagtgcggagaccttggctgcactcttgtttcatgttgacatcataatgcaattaataccagtgtgcctattgcatttgctttatggttgattgtatcctctgtatggatgtcatttatataatggagtgaggttggagaactatcatcctaaatgggtttaatacgaaggttatctgaactctagcgttggtttttattcattttgaccttttaccgtgtttacgacttttgattatttgacttgtttttcccctttgccctttagaatatcaaaattgcttcacctgcaatatgttgttgacaccttgtcacattttctttcgtacaggagaaaggacgatattgaagtcttcttcagctgta

SEQ ID NO: 116091 - DNA, 537 bp, Physcomitrella patens
  Intron number 1 from transcript Pp1s246_8V6.1 (locus Pp1s2 46_8V6) derived from phytozome v7.0 (chr-ID scaffold_246; pos 53894 to 54430)
gcggtgttggcgctcgttgcggcattttgttaggggtgcgtatgttgcttactgtggtttcagagggtgtgctgtgagtcgtttgaagagtttcggctcactttgcttttaagtttgatagtttatgtgggttttgattcagtggcaagctgagttgtggagacgcattagaggtgtagatctgtgagttgtggtttggagatgctggcgggtttgagtttagggaacatgaaaccctaagttgcatcggtgctctagtttgttgattgatctcgcttcagtgagagtcagttctgctctttcgtgaagcgcacttcatattttcccagcagctcttaattagtacggatcttatacacagcaggattgttaatgctaaatctatcgcagagaggtgatttcatttttttggttgtagatgaatctccgacacgcttttcagtttgacctttcttctccttcacattttgactaagcagacctaatttgtgaacttttgcagagctgaatttggtgtagaattatttttgtttctgg

SEQ ID NO: 116092 - DNA, 798 bp, Physcomitrella patens
  Intron number 1 from transcript Pp1s65_27V6.1 (locus Pp1s6 5_27V6) derived from phytozome v7.0 (chr-ID scaffold_65; p os 140309 to 141106)
gagcttgctccggaacaggtgaagtgctatcctggtttttgttcttgagtccaatttgttttaggctgtgacacacacacataaacaaatactgctatatatatatatatatatatatatatagagagagagagagagagagagagagagagagagagagtgtgcgagtgcgagagagagcgagaaatttcagttcattgctttgtggaacttaggctcagtgaactcgaggtaccagttgtagcctcgctggaattactcctggcaagtgatagttttgttgtgcccccatcccccctctgtggctatgacattgttgtataagagaactttttcagcgttatttgacattggagtactgcagtctgaataatcggaagtcaggtgctattggttttgagctgtaaatggcctcaatcatattctacatgatttttctagctgttcactctctgtcaagaggaagttaagcaactccttttggactttctgcatgtagggcagttcaagttttgagatcgctaatgtcaggagtcacaatagtactactggtgatattttgaatcgattgtcgagtatcttagcgtacgatacctttcccccttagcttggacattattttggagcgtcaggaggtaagtatttttctttatgttctgcctttctatgtacatgggtgtattgcgttatcatctgcactcgtgtgaaatgtctccctttttgattgacaggaagaacttgcttatttacatcagcaattattttcgactgccacagaggttgttacgggtggagcag

SEQ ID NO: 116093 - DNA, 837 bp, Physcomitrella patens
  Intron number 1 from transcript Pp1s182_7V6.4 (locus Pp1s1 82_7V6) derived from phytozome v7.0 (chr-ID scaffold_182; pos 96806 to 97642)
gcgtgactccctccgcgtgtcagcagtgatcacaggttgtgagaaacgatacgagcttggtgttcctgacttccgtgtcatcacaagaatagttctctttatgtctagtctgtagtgtgttggtggtatggattcgtgggttaagaaacagtaatactctccgtgtggagctcgaggactggaatcgaatgtttgaggattggtgttgtaggttctcttactcgacgctctcacggctgttccctatctctcaagtttagttctttcattcgcgtttcaatgcagtttctattttggtagcgaggcgtagggcgggtgattttggctcaatgattaataatgtgcaggggaggtcgtttaagcgatcgtaacccttacttggttgcagttggcttttattcacttcttctctgtgtgtctatcctatactcgcacgaccgtgtttagaattgtcgaatttgaagtggttgctgtagacgtcaaatggatccgggaatttaattctatcggtttattacgtatgttcaggaaggtgcaggttatttggctctttgcgcaagaccttgcactcatgcttcgcagtgtaggtgttcagtgtttgagtgttctgttggtaattgcggtcagcagattcgaccacttttgcaattgacacatccccctctcctgaagtagccattctttttcataaatttattgataacttatttgggttctggtttgtgagcggtgggcatcttccttaaactgattactagaaatcagctactaatggggtagaattatgtgacttgtttaacaggtttaattgattctcacttatcagcactggaccta

SEQ ID NO: 116094 - DNA, 949 bp, Physcomitrella patens
  Intron number 1 from transcript Pp1s474_4V6.1 (locus Pp1s4 74_4V6) derived from phytozome v7.0 (chr-ID scaffold_474; pos 55517 to 56465 reverse strand)
tattcaaaagcccagacgcagtggttggtttgccggtagctctcgcattgcccacttgcatgatcagtcggtgtgcacgattgctactgtggttaccgcttgattgttttgctgggatcgcggtgagttgcaggagagtgcatgtcttcgagtattgcccaattttttgtttcgcgaacagcaacatagagagtgagttatcccgggatggaatctcaaaaagcataatttgctgtggtttagtgcatgttggggaagaatcttttgttgtgtgcgtgaagggggtgtggtgaccttgaagggacgatcggttaggttgtgggtgactatgcaacgtctttcaatcgtctttcgattggtttggttagatttcgttggaatattcattgttttgtggcttcaggaatttttcatcacgggtttcgatctattgctgggtttgtgtctgcttgtggatcgggtattcttgctatgatatattgtggaaattaggggtttcttgaagtaggggtttatagaatctcgatatgtttattggtggcagcatcgcagccatccctcagtgactcctaggaatctccttgtaagcagagtgatcattcgtacgtttttttggatattggcttttaatgttgatgatgatgtaaggacgagaacgtatttggtgccaataatactgagaggtatgagaacgggatatgtttatgtttctatgatttgctgttcaaggaagtttacaccttacccttgacaaatttgataagacttttaaaatgaagcccttgatatttgacttgcgtgaactgaattatcgagtactggagcgtctactttaatcctatgtcttagtttttattgtctgcatcttttgttgctgcaacttgataccaacacctttatgccctcgtcagtcatgaaagataattcactgactgagcaacagtggatt

SEQ ID NO: 116095 - DNA, 379 bp, Physcomitrella patens
  Intron number 1 from transcript Pp1s114_87V6.1 (locus Pp1s 114_87V6) derived from phytozome v7.0 (chr-ID scaffold_114 ; pos 486703 to 487081 reverse strand)
gtcttccgtgtttgcgcagcagagagtaggatttgtgtcgccattgctgtcctacgtgcatggattcagttgggacgcggtgtgagtagtggttatttgtacttagttttgaaattggttaatttggtgttggtttttatgcctttgaatatcttggtgtttgagcaagggttttcaattcttaaatttttgacactgtagcggtctgaaattgtaggctagtttcggttgctggaagacgttgttctgcgtaatgtggcactttgtttctgatttatgatagaggaattatttctcagattttctcaattttaaactggacgtccattgcatttcaatcagggcatcacgtcagtacctgagtctttgcaagcttcag

SEQ ID NO: 116096 - DNA, 689 bp, Physcomitrella patens
  Intron number 1 from transcript Pp1s219_73V6.2 (locus Pp1s 219_73V6) derived from phytozome v7.0 (chr-ID scaffold_219 ; pos 416050 to 416738)
acatttctggtggacgattgaagttacaatctgaagtaagttttacaggtatggttgtcgttgttgttgttgttgttgttgcggagagtgtatgagtctttcacgcgccccgcggtgtgtcagtggcgtgtgatcgatggtagtgtgattggtttcctcatggttgtggcgaaattcgacaatgtccactccatgtcgatgcaggatctcattaaaatcctcgcgctcaaaggaaaatcttgcagtgaatggattttgttagggcgtctatggacatttgggttttctttggcggtctttctggcttggaatcgtttcctgagaggataaatgtgttatgcacgcgcaggttggtttagggatggtggtacaatgttataatcccgagatatgagtgtttttgcgctttgtgcgatatgggggttgtgtcgttgagggttgggtgtatcgtttgttttaatttgtgtttatttgagttgtttttttgtttttttattttattattatttttgaccagatttctgtcgatttggattcttctgtctgcgtaatgggaatgcattgttgatggactgctgttgtttttgtgaaaatccaccatcgtattgatgccctcctttttccatgtcatgacaagtatctgtgagataatattccgtttgttgaattctgtggtgattgtgaagcag

SEQ ID NO: 116097 - DNA, 443 bp, Physcomitrella patens
  Intron number 1 from transcript Pp1s64_198V6.1 (locus Pp1s 64_198V6) derived from phytozome v7.0 (chr-ID scaffold_64; pos 1640927 to 1641369)
aatctattgtcacgctcgtggctggacttcatactgtgattcttccttttcaccttcagtcttacgttactaaattattaaaaacattgaaccaatcttgtgttgcaacttatatggattgttttgttttggggatctggattcttctgtttgacttcggcgcattgcagcacaagcgatactttgcgttctgtcactagtctttccacagtggttttttatatctcattaaaaaagtgagaacagggattgggattgttcctatatcgtttcacgatgaattgtgtgcatcgtgttttgtgccggcgtctttacctcagatcgacttgcaggtactgaagcttacggattatccatcggccacaagccagtgatcctcatggctagttactgattcttgctatggaggctgtgcactgcacgaggaaggcttcgaagcgaaa

SEQ ID NO: 116098 - DNA, 802 bp, Physcomitrella patens
  Intron number 3 from transcript Pp1s203_16V6.1 (locus Pp1s 203_16V6) derived from phytozome v7.0 (chr-ID scaffold_203 ; pos 175755 to 176556)
ctttaagtgcagattaccaagtctcgaggacaagagtaagcccctttctgacatacttaaatctgtattcatggtacatgtgaaccttcagtcctgatcattatatggcattttatatgtaagtgatagaagaaatgttctttatcctggctatgcaatgcagttgcggaaatgattgccaaccaaagcaggatattaaggctcaacatctgctgttgtgtctgtcccggggaagcgtctattactaataacaccgtgatatgaaacaattgttttgagccaatagtaaggttttcattcgagagtcaaaagtcattgagcataacgaactgctttgttgaatcccacgtgattgcagagatgaaatctaaactcgcagatattggattttgggactggtgatgtggtcaagtttattcctcgtcaggaattgtgaattgcatacaagttctgaagtcctcgtctatccctgcgtcttggagcaggattaagagtatttaagcttgtgttggagccattcctgaatctgatttattgtggcatcatggagcttgcagcattcggatgaaattggcatttgctcaaacatctagacttttgtgtgtctgcataactcaacttcgtgcttgctagtttctttgttttattttctctagccttgttataaacgcactttttttcctgagaaagcagattaggaatcatgggtagatactgcgaaactagaaaaaattaacaaaaatctgttaatatttgttatggagcaggaggcaaccctcgagagggacgagtttgccttgga

SEQ ID NO: 116099 - DNA, 720 bp, Physcomitrella patens
  Intron number 1 from transcript Pp1s46_67V6.1 (locus Pp1s4 6_67V6) derived from phytozome v7.0 (chr-ID scaffold_46; p os 770681 to 771400)
aattgagcttttgaagatcttgaaaggttctaaaggtatacctgtaggttaatttgtgagttcagatgtgtatatcataccaaacacttatattaacccacacgatcttcccaattgacagatctgtgagtcctcacttctgagaaagttgcgtgatgtgatttgacgctctgtaggtttctgcagtgagttgcagccatagatatctgggacgacatatcatacaatcctgggtatacatgagctcggagagcttgctatcagtttcttaatcaaacccctcagttggaaaagaggactgcagaatgaatcgtttctacagcaagcgctgatcttcactttgaatgatctgtaatgacacaaatcgttcaataatacaaattaaatctatgacctaaatatatgtcttctatttttgagtttgtcctgaagtaggatatggtgaacagctagacctaacctctcatggttgcttagattattcaagtcacgagtaaatcttagtcagtttcttcatttaaataatcgagaaaatccagttgcaaaactcatgttttaggttagtttagttcacatcgatgaacggattaagcttctggctagttagggagagaattagttttttatgtattgatctatgaacagatatccacgatttctcaccacaatggaggacactaagtgtggccaattctctgcgagaattatgattgtgtacag

SEQ ID NO: 116100 - DNA, 589 bp, Physcomitrella patens
  Intron number 1 from transcript Pp1s194_28V6.1 (locus Pp1s 194_28V6) derived from phytozome v7.0 (chr-ID scaffold_194 ; pos 151721 to 152309)
cgtggcctcggtctccggaggagatcttcctgcaggttatttggtcgttcttttttttctgtattaagtctgccttcaaattttgcgctgttcgggaatgtggaatacagtgcatgtgtccttatactccatcggactcgaaacgggatttggaatgtgtctgagggaatagagtacgatgtttttgtgttttgaattaaagagtatggtttccaatggttaggttgtgactcctggagatattgagaattcaggagtatctttaaacgcattcaagcctgactttgactcgaggcttcggtatttgattaagattttgcaaatcgagattaggtaggcaggcataatctgttagcagatattgattttttcgtggtggtagatttgaacttttccggtggagtattgcagaatgttaaggtattttcggattgattcttttacgaatgcgatgtgatggtgatacaatttcataaagaaacataaataaggctttatacttctctgggtattgagaagaggaccttctcatggagtattgcggatgttcgcaggttctgttttggttctcggctttgcaaatcttatc

SEQ ID NO: 116101 - DNA, 911 bp, Physcomitrella patens
  Intron number 1 from transcript Pp1s325_5V6.1 (locus Pp1s3 25_5V6) derived from phytozome v7.0 (chr-ID scaffold_325; pos 43896 to 44806)
cctcgtgcactgcctcttcctcctgctgcttcaaggtgagctacgcatctacgcccctctcctgtgctttgggttggtcttctttccccgttggtttcatccttgctttcgttgcatcgggtctaacctgctcttgagctcgaggtctggttaattgcattgcattttgtctaattcgctgtcccatgcatttgggaagccgtgccgtcatctgcaatgttgaatctcgcaatgtcttctactctacgttcttgtcttcagaattctatgcctcactagcgtaactgaatcggatttgattatttcagcgtctgaactcggtcgaaatatctgagttttcaaggactagccgccgacgttagggttcacactgtctcacctatgtgatcgcggatcgtatcgttctaattcaattcgtgtgacacctcacccattataatctgttaggcaatagtttgctgtgttggaacccttccaagaacggccattcggatcccattaactgtaggtgcacttgacctcatgtataatcattctttacctgctaaggtagattcctttgaatttataaatacttcgaataatgacgtcctttgatgtacgcctcggattccttgcgtacaatgcggctcaagatttaatgcgttgacaatggtcaagttggttgattcatgtgtgggtagttttttactagtgaatcttgattttctcatagtggacattgattcacacgaaagtgtgagccgtgacggacgcgtgagctggctcggtaatccacgacggcgaggatatgtcgcattgggagctagttgggatttgtctgaacaatcacctatcattattatgtagtaactgtaaccctttctgcgtgcgcaggaacagtggaagctggtgttgtgaaatacggcctt

SEQ ID NO: 116102 - DNA, 965 bp, Physcomitrella patens
  Intron number 1 from transcript Pp1s187_90V6.1 (locus Pp1s 187_90V6) derived from phytozome v7.0 (chr-ID scaffold_187 ; pos 576660 to 577624 reverse strand)
gtgtaccggctcaagggcattatctcggagtccaggttcgccagatttttccttgatctcgttttgtttctcctgttcttttcaggttagaatctgaattcattggtgtgatgaaaattggggtttcttgcgagctgtcaatccttcacaaatccggtttcgcgaattcaatctatttagaatagctgtttatgaacgcagtcgaccgagttgtaggttttgagatacgattctcctggtagaaatctgagacctgtatctcgtatggatcagcttataatctcatttctaaatataacgctgatatttaacttgcactattgttcaggtttcatgattcttacgaaaaagaattttgagaaatgtgctaaattttttgtcggtcgtttctgggaaagctctgttgtagtcgcagtgtgtactgtagcggttcgagggaaagcatagaataatctttcatgctgcttagtgtcctctcgttttgttgcttttggtcagtgcgcttacttgaagattatcaaacagcctgcgttgctatttcgaaattttgatattctagcgtggacaatgtacataacttactcgcaatttgaacatgaaaaatgagtatatgcaatccagcattaaggtatcaccaagtgaaattttctacaagaaaatcttttgtgaagcagtagtctagcctcctgggttgaagtaagcgagtgatatcgtgtactttgatatttcttgcccaaattaagcattgccaatccacatcgaatgaatatgtcccaaccttttgcgacttaagtaacccgcggctttagtcatcacgattcagtgacttgctgtgttggaatcaatctgcattgctataatttcttccacaatgttaagttgcccagggttgcttaattatgtaatggtagccgtgtactcttagaaattttgtgaccaggtgcttgggtgtttgtagaacgggg

SEQ ID NO: 116103 - DNA, 814 bp, Physcomitrella patens
  Intron number 1 from transcript Pp1s269_39V6.1 (locus Pp1s 269_39V6) derived from phytozome v7.0 (chr-ID scaffold_269 ; pos 246873 to 247686 reverse strand)
atcccctcagcaacggagctctttcgaattttaaggtggctgcgcttctccctatttttaccatctttttttggctgttcagagtaggacgtcgctcgaaatagtggtggtagagagcttctttctgttctggaggtggaggagagtgaatggagtctgtggtggaagtggtaagtggcttggagctagggtcgagttggctatggagttttcctgaagaagattaatacgtgattttaggtgctaggatagctctccacaaacccacttaccttcaccaatttttattattttttatctcttcattttcattttttattttgaaacagaaggcgaaggaaaaaaagaaaaaaaaataaaacaagaatggcataccttagtcatcctttttgaatgttctcaattctggctgtaaggtccaaggcgaatgttgttagggttttggtgctgattggtgtcaaatgcgtatttctgggctcgagggtttatgttcatggtttagtgtataattgtcaaggttaggcccctactcaagcgagctcagtgatttgattcggtgggttgtatggaaggttgccatgatataatctccgtcctggctttgaggtgctgttagagatgtcttcaggcttctagtatatatacatatgtgtagagatttcatttgcaatcatgaatttcggcacttgagggcatttttagctgtccatgattgccactactaacagaggtaaagtgagtagtaattgaagactggttgtattctcgactggcatcagggcgttaacagatcacgtgaaaacacgagacgtag

SEQ ID NO: 116104 - DNA, 643 bp, Physcomitrella patens
  Intron number 1 from transcript Pp1s130_272V6.2 (locus Pp1 s130_272V6) derived from phytozome v7.0 (chr-ID scaffold_1 30; pos 1038736 to 1039378 reverse strand)
ctgtcgattgatcacgtcatctgtagggttcaactatccctgcaatcacatctgggtacttgaatggtagttcggatatcgcatttgccattggatttgttggaatccttcgactttcacagtcaaacagaactcgaggccaaaagattcgcacattaagtctctttcggtctggtaggttttgaatcaagtagtgggaattgagggcgtgggggagaggagttttgtgggctcggtcggaatctcatgtatcgattgtaaaagcagatagtgtctcgtggttgatttgattgcggaagtggagttcagtagcccttgttgtaggatatggtttgattcgaggaacaatctagttgtaagaatcgcgccaggcgcgaattccttgagagcatttctttggcgtgtgttttttttggttgttgttcaggaactctaagtaaaccattctcttcttttttctggatttccctccgactgtagaatggttacgtttgtgtactgtttcaggatttagggtgtagggtttaagattcaaggtgaagattttatcgtcgttagaagattattggggaagcttaccaggacgccatttatcaatgccatcgcctgctctgaacacgttgataaactgcaggaagcaaca

SEQ ID NO: 116105 - DNA, 386 bp, Physcomitrella patens
  Intron number 2 from transcript Pp1s89_125V6.1 (locus Pp1s 89_125V6) derived from phytozome v7.0 (chr-ID scaffold_89; pos 694536 to 694921 reverse strand)
gttggaaatatctggtgtcaagaaatatcactgtgggtctatgaattttaataacttgcatttggtttcttgagtgtatgtcaacctttttgtttattttcttttttcaggcgtaaattttcgtcagcatggattagaaattagttttagtatttctatgtcttatggtgttgtctatgagagatgtatatttagatataagagctatatgtgtcaactcaaccttgatctcgatggtgatatattgttcgtttctcttgtaattcatgcgtttgaaatggctaattttgtggcacattaattttgactcactactcttccttgtttttaatttttcactgaagttatgcatttattcatttgaatttctttgttacaggcaacca

SEQ ID NO: 116106 - DNA, 322 bp, Physcomitrella patens
  Intron number 1 from transcript Pp1s156_28V6.1 (locus Pp1s 156_28V6) derived from phytozome v7.0 (chr-ID scaffold_156 ; pos 211058 to 211379)
cggacgatttacatcccagttctcgtctacctcaggtatttctagattattcttcttctggttcttgaaccaataggttttgtaatgttctatggaatcagtcctttctgcaaaggaaggtggtatgtgtcgtctacattttttaagagtttttggaaatatgtagttttttctcgtcttacgtctctctcagaaagaaatcatgtgggaggaattcagatgcatcttagagttggcttgaagatttctagggggttaaattcacttgctttgatttgatactgcagactaatttcacagtccttagtgagaaagatattcg

SEQ ID NO: 116107 - DNA, 899 bp, Physcomitrella patens
  Intron number 1 from transcript Pp1s128_147V6.1 (locus Pp1 s128_147V6) derived from phytozome v7.0 (chr-ID scaffold_1 28; pos 1122465 to 1123363 reverse strand)
gagaagcacccttgggcattgaattgttctctgaggtacgcttggttccctcgacttgttttgtgatgttttggtgtcttcttcatttctttgcaagagctatatgtccgtgtaaaacgctgcatgtctgctctttatatgcttctctgtacgggtatgaagaggagatgggtataaggagtttggatacaacactgaaaatttctgaaggttttgcgctagatgccattgatttgacagagtatgagtggaatttattacttcactgcttgttgtatgttactctactatgagaagtattaatcgtaggtagtgctgcaaggttgagccatttcagtgcatcatattggtatgatggtcacgcgatgttgaggcgcactgattttgagcttgtagaggataatattgtgatagaattcagttctggaggggtggggaccacatgtagactatcttattctttgttgtctttcccctttatccacgattttttaaaacttcttattttactccattttattattattctttttattatcattattattatttagctacatttcgccatcttcttgtggcgattctttactggtttagatagaaatggtgttgacctatcatcttttgaatgatgatgtgcattttgttttccagagacagctctgtaaatcaagtgtgaattagttttaagctggtaacgcattgctttgcttttattagtttttcaggggttcatgttccgttactccatttatgaccacgtcatgaataaaccccccttggagcaatcgggagggtgtcgttaatagcattgtcttctgtatgaaatagaatattgggggttgcttgggaattattttctaatttaacctgttgtgggaatggcagctttggtggag

SEQ ID NO: 116108 - DNA, 1026 bp, Physcomitrella patens
  Intron number 1 from transcript Pp1s59_339V6.3 (locus Pp1s 59_339V6) derived from phytozome v7.0 (chr-ID scaffold_59; pos 1735122 to 1736147)
tgttggtttggtgggtacgtggatcatcctctgggtttcatggctaattggttacgttacgacggctttcttgtgggtgaggatgtgagaatggggtgggtgggcctgaatcgtgcagcggttctggagatcgttgattaattttgtttaataggaaatgtggtagaatggatgcaggcgaggggtggctcatacgtctgtttttcctgttgatgtgaagggaaggactggttacatgtctttagatgttgcttgctgggagttggaagcattggggaggattaggatgtcattttttcgctgtttttttccttataaagcttgcagtcaaggtcaaggcaattgtcgattggcgatgctatagtctcaattgttctcttgctttacttctatgggatttccatcggaatcttttccgaggcaaccacaagcatattcttacggacagcctgaaataccgagggcttgacaagtcgcgatgtcgcttgttgatcgtacagatgatgcgtgtaatgtgggggtgtaagtgactggaggtggaagagtcacagatcttaattacaagcttgtcttactctttttgggagctcgcgtggtgtttgcgatttgcacacaagcaagcatgtttcgatatagggtttctgcgttgaattttaggtacactatgtgcgcagagtgaagatgtcttcgcaatgagaagtgggcgagttgtgtggctattgtacaagggtctacaaaaacatcgcgcgtttgatctccacagctgctactatgtcatttttagggttgagctgtatattgaggattaatcaaagaataccttttgagcgcctcaaaaattagcaaaatatagcttctatacttaatatttagcaaatcatgacttctatatattcatgtccctgtatacacacttttactttctggttccaattttggactgtcactgcatgtgtacacaagtgaagcctgatcaacatcagctttcatttctcagaacaggccctgcgtggtgaattgaacttc

SEQ ID NO: 116109 - DNA, 644 bp, Physcomitrella patens
  Intron number 1 from transcript Pp1s37_156V6.1 (locus Pp1s 37_156V6) derived from phytozome v7.0 (chr-ID scaffold_37; pos 946940 to 947583 reverse strand)
gtggagtccttgtcgtcccttttgaaatctgtgaggtctgtttctgtcctgattcggctaagttcgtaatttgaagctgttcttggctcgtagtggcgttggtgacgggaattgcaattggcgggaattgtgtttggattcttgctcttgattttttttgttcaaggagcgcttgattgtgcgctgaagtgaagtcgatgatcagagggagtgtcgatttggttgtaggttgcggggagcgtagtgttttggagaggggatatttggcttaaaagtggagggtatggaggctgctaatcgcaggacatgtggttcgatcggcctcgatgatcgattcgatcgtggcgttttcacgggaggcgtggcgtagattacatagtttagtaattgagggagttttgcagtaatgctcttggaatacaggccaaatgaatcaacgtttccaaaaggtgcttgtttcaataaaatctttcaccaaattcgagggaataaaactcctccaagtcgcacaaccgtgtaatgctttccggatggcatggacaggacagaccgtgcggaattattaatgttgcgtttgagttcttgacctttgcacgagtgataactcacttaattgatgaaggtctagctctttatcagggtta

SEQ ID NO: 116110 - DNA, 629 bp, Physcomitrella patens
  Intron number 1 from transcript Pp1s21_347V6.3 (locus Pp1s 21_347V6) derived from phytozome v7.0 (chr-ID scaffold_21; pos 2110168 to 2110796)
gtgtttgtacttgttgcgggggattagcaggcgaggtctgactttgtggatggattgaccttgttgttgctgtagaactagttggggagtcagggattccaacgcgcattttgtctcttggatcgccctgaagtggttgcatgttttgaagcttcacggccgttctccgcgcgtgattacttgcagttagtgtgctttgcttttcaccttggaacaaatttggggttgcatgtactttctcgtacgaatttctagttgtgatcgttgcaactatttcgtttgacgaggtgtttgtttatcttcttttattttgttttttttgtataatattttgaattttgtctcttccatggtggcattgcccttggctttacctggtgcgtgactttgagatctgatttcacgtacatgttcgcttgaattggttgatcctgtagtctgctctgtagtttacttatgtttgtataatttgtgtattcccttatgcgatagtgtgttcttttgtaccaagtcaatgcttgggaattgtttgtctggctgcatgttgtgttagtgtcatggggtgagctaaactcgactaatttggcaaaccatgaaagaatttgcgacgctcgtgtgctcgtgcaggc

SEQ ID NO: 116111 - DNA, 817 bp, Physcomitrella patens
  Intron number 1 from transcript Pp1s100_116V6.1 (locus Pp1 s100_116V6) derived from phytozome v7.0 (chr-ID scaffold_1 00; pos 564762 to 565578)
gtcatttctcgcagtggcggcagaaaggagatctggtcagtagcgtatttccttcgattcggttagatcaatcttctcgaaatttttgagagtgtttgcacgcgtggtcatgttgaaggcggatttttgctgtggggaaggaagtcaaatgatgctaacctcgctttatttttcttcctgttgaatgtaactaaggtattgcgaaaaaagattttaacttgtagtgcggagtgtctactgaaatcatggagtctgctatcttactgttattgctgttgattcgaaatctgtagtttgctacattgcgaaattcagcaagttcagttcataaacctggttctgtgtaatgtttgattactggaattgtgatacagatcaccacactagttgaatgttgtagttggtatttaaagaagaggtttaatggccttttagccattcaaagttggatgagtttttcaatcattgggcgtgaagctaagatttttaccgcttgacctcaattgtgtagtgcttgggtgattgctataccagcacaacccaagcgcgcatgcttcctaccaggaccgtgcgtttaagtcagaattgatgctgcagttaagaattgcagatgtgcgtatgtattgaggaaatctttcgttgcggatacttcaataaaaaaacgcacaactccaatcctcagagagctttggacttgagctgcaaattcctaattgattcctgtttatctatgttttggtcaagattttgtcattgaaatttaaatgctaaattgatagcttctgttaacaggtcgcattgcgatccggaatccttg

SEQ ID NO: 116112 - DNA, 583 bp, Physcomitrella patens
  Intron number 1 from transcript Pp1s66_204V6.1 (locus Pp1s 66_204V6) derived from phytozome v7.0 (chr-ID scaffold_66; pos 943826 to 944408)
tttgttgccaccgggtcattgcattcaggtcatgtttccagtcactacatacagcatgagagtttgaattcgtggtcgacgttgcgaattacattccgaggattgaatttcggtttcttgttaagattgcgtcacgcagagtcgcatttacaatgcttatttgtttcggtttctagtcttgtgcgctctcagggaattattattcctcgtcgctggaggagagcatttccgaccgctgtattctagaacagagcattttcttgccgagaaattgcggaagaagtggttttaggattcgacgttgcccgttttcgtcgtctccttgcacggatcatcttaaggcgtcatttcgattggttgtgcgattctttcacaggaaccaaaccgggaagtcagtcagcaattgacgtgttttggagctttctgagtccccatctttttaatcttttcgagaatctgtttgccaacctcgaactcatcacatccattgagattcaactgcactatctgctttgaataaaataaattgaatcaattctggattggtagatgtcgtttgtcaggctttcctcttcctcgcaag

SEQ ID NO: 116113 - DNA, 835 bp, Physcomitrella patens
  Intron number 1 from transcript Pp1s90_160V6.1 (locus Pp1s 90_160V6) derived from phytozome v7.0 (chr-ID scaffold_90; pos 1060702 to 1061536)
atcgttgcgtggcgacaacatcgtcttccgtgattgtgagtgattgcgctcgctcgtttcattgccctttggtgtctacattttgtcttttttttcttctctttcttagtatcatcacgattgttatccgattggcttatgatgatctgtagggtatcgtggaagcttgttgatagccacgaggtgcaattttaatatgggtgtgattgttcttcggtgctctatttccttggggattcagctgctttagctctgagtttgagggtaattggcatgcaatatggaaaggtcaaattcagattttggtttttctgggttgttgcattacgttgggtgtcggggttttgacagagctcggctaagtgttctctttaatgtgtgtatagctgcatttaggtcaagtcaattctgtggattgcacgctgatctggtgcgggttatagttgtcgtcggtgttcgcttcgactcttgagcgcatgggagttgtgttgattcactagggtttccacagattcagcattagtttcatggttatgaatatgcgtttccatctgggtgcattaaccggagcttgcatcttgtagtgtagtttaggtcaatgtctgaatgagtcctggttcaaactggtgcgtttgtagctgtagttatatgttaaaattgtaatgttggaaacgttcaattaaaattgtgaataaaaaattgttagcttctctaaagatgcatttagcattattagacgttcttttcccttggtggatggtgactttgattttcacgagttgctgttgaatcagctgaaatttggttcgttgattgatgtctgcagacagaggag

SEQ ID NO: 116114 - DNA, 580 bp, Physcomitrella patens
  Intron number 1 from transcript Pp1s285_15V6.1 (locus Pp1s 285_15V6) derived from phytozome v7.0 (chr-ID scaffold_285 ; pos 133922 to 134501)
gttacccaagcatcccgtggtgagattctcatctcttcatcttctacgctctcagttgcagtctgctgatttagaaagaatacttcgcagtaaaggtgtttgaggtgctgaattcttccttcagttagatctacgttgttcgtgttctgtctaagtcgggctttcagagctggtttacatgcttactaaggaaaaatttgatcaatactaaatgaaataaactcaagagagctggagaacataaaattgggagtagaaactttgtgaagctgcactatcctaaaacataaaacttaaattatgagcttgttcttaatccttaatacgctagaaaattctacatggattacacatacgtggaggaaccgtagcttcatctcacgtcaatataaatcaaggaaatttgtagcagcttgtctcttgaaaacagatgacatagttcaaattccttcgtgtgactatttcagctacagctattgagtgaattaaagatatgtttatacaaaatcaaacctctaaactcaagatttttccgaaatcaacaggccgctgaagtggaatcatcaaacaagattgtgtt

SEQ ID NO: 116115 - DNA, 502 bp, Physcomitrella patens
  Intron number 1 from transcript Pp1s302_43V6.1 (locus Pp1s 302_43V6) derived from phytozome v7.0 (chr-ID scaffold_302 ; pos 315768 to 316269 reverse strand)
cttacgccacactcggtctgaagaagtgccagtcagtgagtaccacaccaccctgcatgacacaaagacgtaattaatgactgttgaattgatctcatgtttccacctcctgggaatctgttagccttaagtggggaaaattatatgagttaaacagcatttgcgctgcagagttagcatgattcccccacaggagggtcgggcatttgtgaattttaatttaccgcagcgtgctctacgaagaacagtgttcactgtttaatgtcatgagtttgtcgcgattcatttaacggtttatgtgtaatgcattgcaagacaccttcacagaagtgttttttttttttgtttttgtttgtttgtttttgtttttgattttttgtttttgtttattttttttttatttttttttgctctacgtagaacacaaagtgtctcattttgagtgcatgtttgacgtcgtttcgcagaggttgcttcggcaaatcgactcgacgcggtcctg

SEQ ID NO: 116116 - DNA, 680 bp, Physcomitrella patens
  Intron number 2 from transcript Pp1s20_321V6.1 (locus Pp1s 20_321V6) derived from phytozome v7.0 (chr-ID scaffold_20; pos 2242952 to 2243631)
cgtatcaggtaagcagtaagaaaactccgaacatccccctcacgctacgatgtagattaaggaatctagtgcctatgtctcccattaacatagaatgtgaacttattgaagcgaaacatggcatgccatattcgttgcatcactatcctgataaaaaagcggttgtttatataatgttgacttaaaatgtggagctactttttggtttgaaaaaaactgaaattggaaattgatatttataaatagttaattgaaaatagttcagaaaagtgccctagaagtaaccaactgaatcaccactagtactgacgtgagatgtcacattacttcctcaacaggatgtaagtaatatcacgtggtcagcaaagctcaaaggggtttgtggattccgaggaaagttcactctaaaaatcctcctttcatgtcgggaaaaagaatgccagaagggtggtcaaaacaaaagcgaagaatatagtccttggtcaatagcctggccacgcatggtgtatgatgcagacgactgtctgctccgatcattggtaccctaggagatgttggattataaaacattcaaggctcttgttgatgaatctgattgtggtactgataactccaccccctggattgaacagcttttgtttaaaaccatgaccttttgctaatgtctgtcccgaggagta

SEQ ID NO: 116117 - DNA, 362 bp, Physcomitrella patens
  Intron number 1 from transcript Pp1s130_17V6.1 (locus Pp1s 130_17V6) derived from phytozome v7.0 (chr-ID scaffold_130 ; pos 100652 to 101013 reverse strand)
cccacaattcgaggcggccggcgaggtcttcaaaggttagcatttagtgggagcccgagatgtttgttacgatactgtcaaagcttggtggtagcacgttaagcacttcttccactaccattgtgtcgcatggcaattctccaatatcattaagtgaattgataagtatctgaacttcagttagaaattctattacgcttgatccttcttccattcgcaacttggtgaaattagctcggatagctagttttcgtgcgttgtttttgatatcaaatttcttttgcatgtatccccagccttctcttgggcaagatatgttgacaataaacggcacaacgttttcttgcacagacagtcggatt

SEQ ID NO: 116118 - DNA, 802 bp, Physcomitrella patens
  Intron number 1 from transcript Pp1s263_69V6.1 (locus Pp1s 263_69V6) derived from phytozome v7.0 (chr-ID scaffold_263 ; pos 409812 to 410613 reverse strand)
aggggtatgcatatcttacctgttagttctgcaatagtcctttgaatttttctttgttcttcctcggctgtaagtcgcactgctgttgactgctagggtttttgaagggttcaaggttgttagttgagagtaatcaaggattggctctggaacaaatcaatttaagctaattatagaggtgtttctctttgcatctgccagtccctacaatcaaccagtgaagttgcgagagaattcgtattttttttgttccagagcaatacacaccacccgagtgcattcattaatttctattaggctcaaaagaattgaacgttaaatctttttcatattgaaaattcttaggagagagaaaataggggcgagataattaatcacgtgaacaatcactcgaccgatcgcagtatgtctattggagattagcaactgtgaaaagttaatgtattttcttaaaagtcatctaaaagagcactgcagaagcattatcgaagatttttaggtatggtttagcttggcattatctgcgctcaatgtctgtgaaacaagaatgcgtgctgcctacattggctatggaacccggcaggagagatttaacaagaaatggtggaaattttaacagtttagggaggctagatgaagtatgaacttgtcatcagtgtaatgtgctgggtgtttgtatttttatgatattatcatggttttatcttacgttgcattccgtattcaagtgtgattgtggttatttatctaacatatgttgaacttctgaatggattacaggccgatcacgtacgaccgactg

SEQ ID NO: 116119 - DNA, 634 bp, Physcomitrella patens
  Intron number 1 from transcript Pp1s207_28V6.1 (locus Pp1s 207_28V6) derived from phytozome v7.0 (chr-ID scaffold_207 ; pos 218814 to 219447)
ttggtcgcttctcctcccacttgaagattggtattgtaggtcctcaaacattaacggcacttttactcgtgctccgtgtgtatttgcatcgtttgattttgtaagtgtagtcgagtcgctgtgttgcaagttttttttgttttggtcgctgggcttggggcagattgtttcgaattctggttcagtgtgctgcagccactcagctgcggtgtgtatttatttatttatttattattttattttcgcttgtttgatccttattgcagcacaattcggctgtattaggaaagcagtattgatcagtagagtatttctctgttcccaggaagtattttttttgtcgttcctcactaaacttggctctcttttgcttcacattgtgattagagtcagagttgatgtctgagttccttcccttagataattgaagccggtttgtttttttacctcactttttgtgtgactctggtctcttagtggcaggcatcttcatctggactgatcacggtcattgaattcgctaaattgataaagttattaacccgattttaattttctctttgcatttcgtctttgtttcgtatcttgttttcatcattacattgcgtgattgatttgcaggttggactcccca

SEQ ID NO: 116120 - DNA, 1015 bp, Physcomitrella patens
  Intron number 1 from transcript Pp1s87_179V6.1 (locus Pp1s 87_179V6) derived from phytozome v7.0 (chr-ID scaffold_87; pos 1333118 to 1334132)
gtgggtaaaacgaaattcgactttaaggtactttcgtctccatatgtgtactcctccttttacgaatttcctcaccctgttgcgtagcatgttctaatctcgactcagttctcaagtgtcctcgttggtagggtcatacaatgaatctgcttttcattccctatcttcatggtccttcctagtaactctactgaaaactcctccccatccagcgagatggtgaagaactgaagtaaacggaacatgtcttcactgctcttttcgctgacttattagctttttgagtggcattgatttcccatggatttgagatgcacatgactgagtactttcaaatgagatgtgtcgagaattattcgtccaggttttctgcgtttgtctagtgcactgctcagtactctaattttcagcgaggacctcaaagctgttttgaccatgaccgtctagctgtttatctcttccctcttctgggcctctgaatgtcttggggtgatgtctttagtgagaagttatggtaaagaaaatatggaaaaaattaaccggaaacgtttctcgtaacgattaaatgcctctcttgacggtcttctcccggacaaggattccatcccaactattcaattaacagtgttttgaccccgcgatacacggctctgtgtacaattgccactttgcaacacagtaattcactctaattgttgaagtcctgattttgaagcaatctatgtcctggatcatattttgaagagatagctgcatgtaatagttactaaggcttcgacgtaaaatattagacttcgaatcttccgtacttctttccaaggtcaaatactggtgtgaaaggcttaccgtagtgtctcttattcctctacgactcacgtggggttaatgccatcggtcatgaaactatctgcctacctgagttgtgaccttccggctctgggattactctgtataaggtttctccaattgcttacatggttgaccccctgactcttaacagggaaagagtgagcag

SEQ ID NO: 116121 - DNA, 880 bp, Physcomitrella patens
  Intron number 1 from transcript Pp1s216_68V6.1 (locus Pp1s 216_68V6) derived from phytozome v7.0 (chr-ID scaffold_216 ; pos 767396 to 768275 reverse strand)
aggtgcacttctcttttccttcctctacaccttatgcttcatggcactcataataatttaatatcagttacatttttttccttcacctgagctgaaagtcattgtgtggttcttactgggtatagaagttaaactttgcttattaccactcctagactagcttttaatgcggccagcggatgttaagtgtgtattagagccgaatcttcgataagtttagggtttcaccagcctgctcgcaggcattgatttcctagtccaaatgtagagtttagtgataagcacggagaacgcggcaggggttcagttgagttaaactgtggaattctggtcacgagttattgtgttagctcaagaaacaccctacaactcacacttttctttcttcatgctcattttgcactcaagagtagagtctggagagctatccttggctttcctattagggccgttttaaacttcattttgggatctcttagacacatccctctgcctattcctctacaccattcaatcaaagtgtccgtgttgttagtgtgtcaacacatgttaatgagtgtagtaattattccttaaaggacagtatttaggacccttttttctctttaaaatcacgcatgtttttatttggaaagaagatatatttttttgatttttattaatcggcattacagcaccagatttggcttcttccttacacatgatgaatagcaagaagtttcacagtccaaaaaaataaaaatacaaaggaatcgtgtcagcctgttgaatctatcacgttgttacctctatagcatgttcttcgagcaaatcattgagtcggatgttactggagggttgagcaggtgtggaacgtcgtcggagtgttgaactaccttca

SEQ ID NO: 116122 - DNA, 931 bp, Physcomitrella patens
  Intron number 1 from transcript Pp1s7_123V6.1 (locus Pp1s7 _123V6) derived from phytozome v7.0 (chr-ID scaffold_7; po s 576789 to 577719 reverse strand)
cagtctattaaccctaaggttcgatcctctgtccgcgtcctccaaacgttgcccctaggcattctatctctacgttttgttttgttttgttttgttttgtttttttcctctctctctctctaggtcttgtcactactttaaagaattggtgaacgctttcgaacatctactctggatagttgatgtgagattaatgtgacatcttggaagttttacatcgataccttcctggaagccttctgctatgtgtgccctctgcgtatacgaactttttatgttggtttaaatcttgatgagatgtgtctagatgaaatcatgaggcgttgtttacttgctggcattcagaacaatagacttctgtagtttggattgcttgaggattttcttgcgtcaattacggcccgtgtgtctgtccaacgcttagatactctctgcctttgatgtatgccttccttgagttgaatactttcctagcctaaagctcctcttagtgtgactgtaatttcatttgtttgtttaattatttatttgggtttttgtgcagaaaagtggttttcttttgttgatagtagaaccagagaacggaaaatagtagtactccctcatccatatgggtttaatgtatcaggagtattggtttttacacgaaagacacaaacccctcaattatttgtagattcacttctacattcttctagaatgcacgctttcagcgaatcaagttcagcagacagcaacctttgagagaattgttgtaattgaggattgccacgtgctgctgattttactatcctcgttcctggttatagtgttattataggtcttaaaactctacttttcatgttcttattgagtgaatgttcgtcacttagattcttttctgtatgtatacgcaggttatcaagacagaatacgcagttcgtggagagat

SEQ ID NO: 116123 - DNA, 609 bp, Physcomitrella patens
  Intron number 2 from transcript Pp1s180_144V6.1 (locus Pp1 s180_144V6) derived from phytozome v7.0 (chr-ID scaffold_1 80; pos 887750 to 888358)
tggccgaggtatcggaggagcctgaaggccttcaggtgggtttagaatttgaactttatgtaattagatgttgtcgtcaattctgtccattttacactggcttgagctgctggaacctaagtggtctttcttccagtttatctcctagaacagaatgtgtagctggtgcactgatgcatgttgctgacctggcttctcatatttatgtcatggttacttataacctctctcacatgtgattataagctaagtattttttataggtgaacaaactatgattaaaattaacttcaaaagaacatgacagtgcatttgctattttttcctgtgagatcactgcctgtctaaggttcaaatatcacatgattcagtgtttcttcactgtacacttttgccattgttgattatggcaaagtgttgcagactccgatgaagaagtttgacaaatgattacgtaattatgttttatgattcctcgtatctatgttgcctgcactcattagaaacgtttggtcatattacgtatttgagtaggcaatgtaatgctgccaaattgactcggcatttactagacaacaaaccttgtgattaccgcagggcagtaagttg

SEQ ID NO: 116124 - DNA, 596 bp, Physcomitrella patens
  Intron number 1 from transcript Pp1s32_217V6.1 (locus Pp1s 32_217V6) derived from phytozome v7.0 (chr-ID scaffold_32; pos 1511857 to 1512452)
caagctgtgattgcaggaactgctgcatcaggtacgattcttcttgcttcagacattacttttgttaattttgtttcgtgcaattgttcttttagcatgaaaatgatgcagctgagattgtgcttcctaatagcgcgaaggcaatgtttgaaaatatgctgtcctttgtaattgaatttcccatttgaaactatttgaatgtatacttgagtaatttcgagagataagcagcgttttaatcttacttatagaacagagattcccactattaagtttgatgtgagcgaatttggctgtgaaacccaaatagttcgcccaatagcacttcttattacagagctgcatattgtggctttggcaagtagttatgatctgtaagccagctcgttatcctcgtgcaaagtgatttaattttttttttattgtaagcttcgactttgcttgttggttctgttgggctgtttgatgattagctgtttcaatagtatgcacatgtattttgattttatagtctaacatacgtccaaacgatggctttcaatgtgttgttatttgttgcaggtgtacttgcatccatactacgcgtgataacgaag

SEQ ID NO: 116125 - DNA, 581 bp, Physcomitrella patens
  Intron number 1 from transcript Pp1s171_81V6.1 (locus Pp1s 171_81V6) derived from phytozome v7.0 (chr-ID scaffold_171 ; pos 465156 to 465736 reverse strand)
cttgtcaggtcgtgcgggctcgattgatttgcggggtactggggctgcattctcttgtgtcgcgttgtttgattatgattttttcttctagaattgctgcatgttttagagaattcagttcgtgctttctcttttggggtcccctgtggactggatattgcgttcatcgacaggtttcccagtcgtttctgctttttgtggggcgttgggaatgtgtacccagaggaagtatcttggtaaaggtttactgacgcgagggtgtgaaatggtttacaactcaatgcttgtttagattatcagtgttacagtggaagaccttgtcaagataagtcttctagacttttctgctggtttttcccctcagtgtcttcaggtttatgtaggaagggtacgttgtgcccagaagaagcgaatctagggtctcaaattgagattggttgtagggttaatgaattctcaaaaacaggagcgaggatagattccttcagcttctatactcttttgcttgtcaattgttccttctctcacaccttctgcaacgtgtctttacagttctttcaccatttatatactcttcttgt

SEQ ID NO: 116126 - DNA, 729 bp, Physcomitrella patens
  Intron number 1 from transcript Pp1s257_88V6.2 (locus Pp1s 257_88V6) derived from phytozome v7.0 (chr-ID scaffold_257 ; pos 503473 to 504201 reverse strand)
ttttggcttggagtttcttcgagctgcttgctgaggtttgttgaaagctgcggcctttgggcttttgtttcctttgacttcgcactccagtcggtggtctttggttgttttggtttgtttcgacttttgggagtttgcgacgtggaatttttgctgggtagaatggaagttgctgaagtaatgattttcaggacgttctgcagtggaggtcgttcgaggatttcgaagaggtagtagaaattggaaggtcggtaggatggggcacaccttgtgatacatcgagcggacatttgagtggagcttcgcattcttggaaagacgcagagaccaattgtttactctcagtcatccagaaatgtgaacttagaaacatcgaccagaaattattttgagttttctctccttttttcttttttcgaacagtgtttcttaactaccaaagcctttttcttaagaccgtgtttacaatctgcactgcgtggtcgaaatcgtcgattggctttctctatttccgcgtgtgtttgttaccaaatcttgtaagtggtgaaagagcaatgtcggagattcctctgacgatcgaatgagtatcatgtctcctggtcaagtataaaaccaggtctgtcaaagctgtggtgggtcgttgaagaacaggcttgtgcattttccatctgtctgcagctctgaaggtgcgataattcgtgtttgcaggcccaggttttcctgaacacg

SEQ ID NO: 116127 - DNA, 857 bp, Physcomitrella patens
  Intron number 1 from transcript Pp1s391_60V6.1 (locus Pp1s 391_60V6) derived from phytozome v7.0 (chr-ID scaffold_391 ; pos 280034 to 280890 reverse strand)
ctcctagtggcggatctgtggtatatacgtttaaggtattgttcgtctatgctgcagcggtagagcgtacatcgcggccctctccgtgtgagatcgatatcatggatttaatggatcttcgagttggctcgaaatatttccccgtgggtagtgtgttctacagatctagtctggatttgaacaatggcaacatggtttgtcgggtatgcaacagttctttagtcattgttgttctgaagaaaatctatggatgtgcgtaaaccaactttctgcttggtttctgatgattcaacgtcacatcaagaaactcttgtcgtattttccttcggaataaacgaatgtgacctaataaacactgagataagtccggctcttttctgcaacaacgtgaaggttttttttgtgtccgaagcttaattgttgaagatgacacttctatcaactttttattcaatgcctaaggttcctcgcacaatctaatttgcattgaagtcatttgatgtgaccgccacttttccaccctatattacttaggaataaacacgtggggtgtcactcaaggaaggctaaaggaacttgcgagtacttcaggaacatattttggaagagaatcattatacttgacgcatattctgaaaggactagtcattatgcatgttggactcttttgctgatacaggattcctgatttctgatgtggtacattggtacatcaaaacgtagaaaatagcacgttctgtgaagggattgcggggtccacctggaggcgcagatctccatattggatggaggctgatattttgtgatggtttgttgggacaggttgcgtaaggaattgggaaactgtgcctcgtgga

SEQ ID NO: 116128 - DNA, 406 bp, Physcomitrella patens
  Intron number 1 from transcript Pp1s49_85V6.1 (locus Pp1s4 9_85V6) derived from phytozome v7.0 (chr-ID scaffold_49; p os 608282 to 608687 reverse strand)
ttcatacagattccggacaagataacattgctcaggtaggggtcggtatttactcagtttctttatagctgttttgtgacaaccagtgatgcagaataagacgttcggacagtcaatccattgatcggtaatattcttaatcaaaatcaatcttctgtggaattcgagttctgcacccttattgtctttttttcgtttttctttttattctttggaatttattattaggacgcatcgtgagctggtgtgctgatacctgaagttaacaatacgaaaaggttatgttatgggcgtatatgctctgttgcgaacaatcgcattcctgtcaggtagttatgcggaatagaacaaaactgacgtatgttgtctggacgtaatattaaccacgtgcatggatctatgcagg

SEQ ID NO: 116129 - DNA, 471 bp, Physcomitrella patens
  Intron number 1 from transcript Pp1s5_381V6.1 (locus Pp1s5 _381V6) derived from phytozome v7.0 (chr-ID scaffold_5; po s 2845493 to 2845963 reverse strand)
cacgaaaacgcttctgaaattgcagttgccagctggtatgtggctcacgagtggtctcggggcgcttgtttgacttaatgtgtggaattctgccaacggcattgtgtacctgaaggttgcggcgtcatttttatttatttatttatttttatttatttttatttgtatatgtttttgtttgttcccgcttcttcttttgtttcaaaaaatgtgttgaaatctttcattttgatctaatcttaaaaaattggagttaattttgtcaagtgcacagtgttgttgatgtgtagtaaacatatagcacttagtgatttttttattttttatttttttattttttccaagttgcaacgcttcacgttgatgcatgctcctggcgtaattgtttcttgttttgatctgtttgtttctaccttttcacttggtgatcatgtaggctcgtatcaataccagttgatatcaaggcgaccg

SEQ ID NO: 116130 - DNA, 242 bp, Physcomitrella patens
  Intron number 2 from transcript Pp1s12_339V6.1 (locus Pp1s 12_339V6) derived from phytozome v7.0 (chr-ID scaffold_12; pos 2394246 to 2394487 reverse strand)
gtgctgtctatgtaagtgttattcctgtagccatatctactccagaaactagagtcgattaaatttgaaaatggatgactattcctttacatgaatgaccatttgaatagctaattcttcttgcataatttttgtaactgggggttcattttgagttctacttgacggttccgtcgttcttttccgcttcacaaaacatttgattaggagttgattgtgcccaagctggttgttattgcagg

SEQ ID NO: 116131 - DNA, 653 bp, Physcomitrella patens
  Intron number 2 from transcript Pp1s18_305V6.1 (locus Pp1s 18_305V6) derived from phytozome v7.0 (chr-ID scaffold_18; pos 2435931 to 2436583 reverse strand)
cgcaagcagaaggaggctcatcgcaggaataaaaggtactgcgcttgtctgcaatatataaccccataacctagcttggctcccactctgtcttcgtggtgcagtagatatcttggcactcatcacgttgtatggtggagtttctgcaacttatactagccttgtcaatggagaagtgcaccttgatcacgaccggtgggatattccaaggactctacttccttgaatttcatgatcctctagtaggcacggaaattgccttccttcgctggcagagttcacaatttgaatgtggaagtgaattgcctgaaagacctggagaatggtgtcaactgtgtgaatcatttcgtgtcttgaaattttcgctgcctgcttacattttgcatgtgtaattcatcatacatacatcttgatatcgcacggtataaagttcatatggaaatatttgaaaactatgctgctatcgacaaatatttttctttgattgaattaattgttgctttcgatttttaaattagggttagtttcctagttctgcacgtatttaataattccatatttcaattatggtagctcttttccagtaagattgattgaataagaattttatttgcacagcaaccgaaggttttctggaccacggcccgagggtg

SEQ ID NO: 116132 - DNA, 956 bp, Physcomitrella patens
  Intron number 1 from transcript Pp1s62_83V6.1 (locus Pp1s6 2_83V6) derived from phytozome v7.0 (chr-ID scaffold_62; p os 725971 to 726926 reverse strand)
cttgctcctcgcgaagtcttgtcgctggtttccaggtgccaatttgtccccattgcacttgaattatcaatattcgtttcgtgcttatttgtaaaaacttgcacagtccaaatttgtaactgtattggtagagcgtgggccttgtagacatggagctttgagctttgaagaatttggcgatcggtgcgcccttgattgatattaatgtatcgaattcggatttcttctcctgaaattctgtttgtttctctatttctttcttcttgtaccgtgatctcagtgttgatggcatgtatatggcgtacttcatattgagacatttggcaccattgagctgccctagaattgtagtgttccagtttgaagagttcatgtccttttagtattactgcaccttgaagcttcaataagatcgcctttgtgcttttcgatgactaaatttttattccattttgtgcttgcaaattagtagttgagaatttggtcgaattccagaattcccactagaatcctggtagatccagcatggaaattttgagagtttttaactgcaagaagagctatgctgttcagtgattcctggattatcatgtgtgccggatgtcttggtcgatcgtgtaagtaaacgtccataagctaggtctggatattgtagtgatagcttgcatggcttggttttttctaggtaccaaagctctactgtccagctttctgtcccatggtttgtcgatttctacttgaaaagtggaatcccgaactttagtaagcaatactttgttaggctccttgagcccttaaatatgatctcctttctcatcgagcggtgcagggtactgtggcaatagttgccagtgaattagttgtctgggccgtgcagagtattttttgaaagcttacaatgtttgtggttttgacaatgtgagcaggatctcaatcagcaaggttcactcaaagaa

SEQ ID NO: 116133 - DNA, 679 bp, Physcomitrella patens
  Intron number 3 from transcript Pp1s115_171V6.1 (locus Pp1 s115_171V6) derived from phytozome v7.0 (chr-ID scaffold_1 15; pos 940376 to 941054 reverse strand)
gattgatcggcttgtcggcaaattctgtaagcatctttgataatgtttttttaacacaaccattcttaagtgaaacctagccattaacatccttgtataattggacttgctgttaagttcaaattttctcgtttagttcctcatgttgcatgctttcaatgcatttgttatacagaatgtacccggcaatgtacgcaatccggcatgaatctaccgcagcccgatgtagttcacaatttgggataaatacgtatcagcagagccccaataacacgttacagcagaatggtggctctgttacttcattgccacgtcagaataacgcaattcagcagcagcaagagcagccagcggttacaagctcaacacgcccagcaacagcgcctagttcagcagcaggttgttttgttttgttttatggtgtgtatgtttgtttgttttcccctttcttcttctccttctccctctgttgtttgttttaatcattttcattgttttgatcttttttccgggtagacgggaggatcgccgcttgtagccatcattttggtttttagcacttggaaaacttaggcgattgaacgtttgaatatgtctgagattgttggtataggtcgggctcttttgtgtagatttagtttaggctttttgatgacattatgtgatattagtacaggac

SEQ ID NO: 116134 - DNA, 816 bp, Physcomitrella patens
  Intron number 1 from transcript Pp1s246_114V6.1 (locus Pp1 s246_114V6) derived from phytozome v7.0 (chr-ID scaffold_2 46; pos 523255 to 524070 reverse strand)
ccatcggcaactggaacgctgcattgtcagtgcgaaatctagttttaggtcactcaatttgtttttaagttgagaattgagcattctgttcttgatccgcacagttggacagttcaccaagaacaagctttactgagtgactttcaaccccttgtcctctcaactctcatcacttcagtaagcttcaatgcacagtgaaatttctcagaaatcttggtcgtggggtgtgctgcgtggccacatcccgtcgagaacgacggatttgatactcaatatgttgactcacttgtattgtgcgtttccaattcgtcactgaatggcggaatggttcatgtgtggaaccctacaaatgccttcataactcgtttctcgatatttacaagtgggttgttacgatgtaggtgatgacttcaatgggtcgtggatttgattatcaatcaactaacacatgttttgcctggttcagaaaaatcactccaagaaatgttcctagcaatgatcaagtttccaattctctgcaaccgaagaataagaatatcagagattcttatgaacctgagattgtgctttttgttgtcatgattttccacactactgcaaaacttgtaggtgaaggtgcatccggggttcggaactccacactcatcaaactaacgaacactctacaaaacatcaatgcagtggctctggctcatcaaccgctgcacaatcacacacactcgcacgcacagtcaggaacaaacacgccagccacctcccgatctcgattaacacaaccaagagatccctaatatgtgtgatcagattctacatttc

SEQ ID NO: 116135 - DNA, 1053 bp, Physcomitrella patens
  Intron number 1 from transcript Pp1s178_81V6.3 (locus Pp1s 178_81V6) derived from phytozome v7.0 (chr-ID scaffold_178 ; pos 594889 to 595941)
cgagtctaacccacggcagcagctagctaggtagccctcactacacttattgcgtctcgccagcttcatcagagagtaatgtgcagaggagcagcagggggaagaggaggttgatttcccagaagggggcaatttcaggatgcgcgtagtagccgtgtgtcgcacgtgagggaggagttgttttttttagttattttttgttttgccgtggtgtgtttgctgctgagtggttgtggaagaggagaatgattgttagttcatgggtggtggaaggagcccagctggatcggacgtgtagtggattctgcgtcaagcttggggcgttactggcgctctgcgggggtgtgatttgagcttgcctttcttctgcaggaagttttaggtgtgtttcgacgttgcgcagttggttgtagtgggttgcaccatgggtgttgcttgattcttcttggagctctcagatggctgggagcacctgattgtcgataagtgtgccatgggatgcttcaagatggcgttggtacttccatagccagagtgcttctttttttaaattgtatttttggggtactcaaatttgttgcaggaacgcctccagcgaggctctctattccactatcgcggattagcgacgtgacagagagggggcactgattcttattttatttttttagtcgttttaggttacttgttagaaacgcatctagcattctagtctgagaaacttacgtgccacggaatttgcattcctccctgctagtcttgatttactctattgggagttcagcatccaagctaattcttcaaactgcaatccactcatttcgctagaggccttgtcttcttggttgttgtcggttctgtcagtatatccatggagtgtttgctgcgtgctgcatccttatgtttgtttcttgaattcatccactatattaatcactgtttctgtgcaacttttctatccttaggttggagctctccctctctttatgtaccctgagtcttgtgaggatttttgcaggaaacgactggagagcacaaggtataggttgcagc

SEQ ID NO: 116136 - DNA, 810 bp, Physcomitrella patens
  Intron number 1 from transcript Pp1s474_4V6.4 (locus Pp1s4 74_4V6) derived from phytozome v7.0 (chr-ID scaffold_474; pos 55499 to 56308 reverse strand)
cccaattttttgtttcgcgaacagcaacatagagagtgagttatcccgggatggaatctcaaaaagcataatttgctgtggtttagtgcatgttggggaagaatcttttgttgtgtgcgtgaagggggtgtggtgaccttgaagggacgatcggttaggttgtgggtgactatgcaacgtctttcaatcgtctttcgattggtttggttagatttcgttggaatattcattgttttgtggcttcaggaatttttcatcacgggtttcgatctattgctgggtttgtgtctgcttgtggatcgggtattcttgctatgatatattgtggaaattaggggtttcttgaagtaggggtttatagaatctcgatatgtttattggtggcagcatcgcagccatccctcagtgactcctaggaatctccttgtaagcagagtgatcattcgtacgtttttttggatattggcttttaatgttgatgatgatgtaaggacgagaacgtatttggtgccaataatactgagaggtatgagaacgggatatgtttatgtttctatgatttgctgttcaaggaagtttacaccttacccttgacaaatttgataagacttttaaaatgaagcccttgatatttgacttgcgtgaactgaattatcgagtactggagcgtctactttaatcctatgtcttagtttttattgtctgcatcttttgttgctgcaacttgataccaacacctttatgccctcgtcagtcatgaaagataattcactgactgagcaacagtggattatgcagatttcttcagtg

SEQ ID NO: 116137 - DNA, 573 bp, Physcomitrella patens
  Intron number 1 from transcript Pp1s53_154V6.1 (locus Pp1s 53_154V6) derived from phytozome v7.0 (chr-ID scaffold_53; pos 991501 to 992073 reverse strand)
gtatcgtggaaagaatctttaaggaagtccaagtaatggaattttctgaacgcataaacggatggatcagagattgggaattcaatttttttgatgcgtccaatttcactcccggtcaattgaaaccagacctgcgattaaggcttgagttacattatactggaagcgcgctttcccttctgattagcttgttattattctttgcctgatcttaagagatattgatgtcattgcatacacaaatttggatttaatttggtttcaaacatgtgtagtattttcattcaaactggtagccgatattcttcacttccaatcactcatcatctgatttaatgatggaaatacttgctaactcgtcctaaggcggttgaagcaccttctatatttgcagaatggttcttggattcttggtatcttgagcatttttatatctctctaacgtaaaattttgatgatgttaatctgtgagttgtatgtttttgatgaatcagttgaatgtgtagccccaactcacaacttttctcactgcactgcatggcttctctcaggtcttgaagttgaacggaaagg

SEQ ID NO: 116138 - DNA, 1028 bp, Physcomitrella patens
  Intron number 1 from transcript Pp1s140_17V6.2 (locus Pp1s 140_17V6) derived from phytozome v7.0 (chr-ID scaffold_140 ; pos 114386 to 115413 reverse strand)
ctcggctgagcaaggttcgtggctgctttggtgcccaattttagttcccattgttttgatgtgccggtgtcgtattgctttgctcttgctgatgggtgccagaattttgatcaacaacgaaatctttgaacgctgggtttggtcttgacgcgatcaatttctttgttatgaatcgagcggagaggttttagttttctctagcagctgcatgatattgcttgcgttcttttcgtgaaccactgtgatggatcgttcgtgttcgatttttttacgcgtctcggttacctcttgcaacattatttatttttcatgcatgggaatttttcactgtatgcgtctaacttttagtcaggatatgttggaaattctaacttgtaaagttgacaattatagtttctctcctagccctttgcctggcttcagtttcaacttcctcctcatgcgtgatgttcgaagatgacagtgacttcacctgaactgatggagagcttgttcagaattgaacccatagaagggtttggcgtgacgaccattcttaggttatggactacggttaggtggcgaagtagctgtattcccactggatgcgtcttattgtcatgccaagtagcatcaagattttatacgcatcatgaatttgattagacatcgttgtatacaagttttcgaaagagacggaatgtatgtttcttgaagtttccaggagatatgaggaaagccttgtacctacactgaaactgataacagtacatctctagctcattcatccggattccgaagagctgcggttttccggtctatctttaccttctgttcgctccatgttgtttgtgagctgcacaccgaaatgtaatattttttagtaaaccttcagagatggtaattcttgcggtctgtcttgacatgtatgttaaatgttttgatcgcctgcaacagttacccgacaaaattttgaagtttgatttaattagttacgaatcgtttgatgttcagtcttcgagggaattctagaggtgttgctggttgca

SEQ ID NO: 116139 - DNA, 1033 bp, Physcomitrella patens
  Intron number 1 from transcript Pp1s123_105V6.1 (locus Pp1 s123_105V6) derived from phytozome v7.0 (chr-ID scaffold_1 23; pos 771110 to 772142 reverse strand)
attggggaattcggagacgagcgttggcgccgccggtacgttttgtcactctccaccttgttccatgaaggggtggtgggttcagcaggatcgcgttatcgtgattttctagagtcttgtctgaaatggtcgtgtgagaagcgtttttaggatgagcagatatgcagcggcggcatttggggttttcgggatctattttgaggtttgacttgaaactgattgttagatattctgtgaagttgttttcactcctggtgcacatctttttgagtaagtccaatttttctaagctcagggacataactttattgttcgaggtcgtgagattgtatgaaatgagcgctgcacttcttcacgttgaaaatgaggggtgaggtttctgagggttaaggcagagccaggttatagttctggtggttcattttttataagtttgccgaagagttttctgttacgtgtcagagtcgaaacatgaagaacgttttagctatgcagcaatttcttcgcctccatttggacgcattacttcagtttaataccacctgtcaaatgcattccaccacattgtctcacaacacaagcggcatttgggaaaattaatgttagctcttttaagtatcgcgttcctctgtgtgcgtggttcacaattttcatgtgtgtttgctgctagtaagaactcgtttgtgtagattgtaaatattctagatccctgcacctcaccagacttaagatagtctacaatcaaaattgacaatattcttagatcgcctacgtataatatgtaatacatgattaaaataacagcttaaccaccatactgagaatgctggttccagaaacatctgatgagtattggtccggagtgcaatcaaaattcaataggaacaacttcaaattgagcattcgatctactcactgtattcccgattaggtttagagtcttttgtagtgaagaaccgaaaaccgacattatgatatcaggttaacaaattcacaagcttttaattgaaaagaaaaatttttggttgcagaa

SEQ ID NO: 116140 - DNA, 924 bp, Physcomitrella patens
  Intron number 1 from transcript Pp1s65_130V6.1 (locus Pp1s 65_130V6) derived from phytozome v7.0 (chr-ID scaffold_65; pos 763586 to 764509 reverse strand)
tgagttgggtggtcggtttgcgaagcagggactaggtgagcattatgagctctgtttgtgatgaaagtgggacgggttttaggagcgctgcataggctccggttcgtgattcgtgatagtttgagccccgctggctctcttgcttccgggtttcgctattgatttctctttctggtctgtgagctaagcgtacatggctcgtatcagttttcgtcgcagttgacatagcttgcagagtatgtttgtctcgtcttcatacctcgttggcattgcgtaagaccgttccgcggggatatgtaaggatcttgggacactcgttccaatgctaccgacgctgttgctacgaggtctattcctgcgcgaccatgaaaagatcatttgggctatgactttgaagagaataagcttcagtagaaagtgtatgtagtgcctacattaaaaagcccaattataacctcaatgcccctgcatagatcttctacctgctcgaattgtcattcaaagattaaactcatcaaccaaactagctagttccagcgttgtttatagaatgttccgtttgcttgtcattctttgatcgtgcctagattcggcaacgtcccgtgctcattagttcttctgagtttgtagggatgtgagcattgcgacatggtcggaggttcgaacttgtagtagtaaagctgatgatttgaattcgagctggagaactggtggctgtcgccttcttgagtaggtttatgacccaacggccgatatattttttttttttcttctgccggagtgatggcgttctcgccctggggtgagtgctgatattccttcctagctatcttccggcgttcatcactttggagcacaagcacgcttaccctcttgtatgcgcttgcaggcacttacagtgtgcaagggggtgcattttggagc

SEQ ID NO: 116141 - DNA, 1046 bp, Physcomitrella patens
  Intron number 1 from transcript Pp1s33_195V6.1 (locus Pp1s 33_195V6) derived from phytozome v7.0 (chr-ID scaffold_33; pos 1169775 to 1170820)
tccctccaaaagcagaaggaaataaggaacgaaaggtaccccttgtactcacgcctcgattcgaactatgcaagcttgatctgtgaattttttgaaatcttccctgttactcagagattttttttgttagattggatgcttagaaatcaagcatgcgtagatgcataaaaattaatcactatgaacagatagtacctgagaatcatcacattgcacaaaattttaatcagtgcaatattcatgcattactttgatcccttcagtgaaggttcttactgaatttggcagtcagcttgtgaatgttcgaaatttagttatgttacttaccagctgaactcttactatctttaaattcagggtttctgtatgtaaggcagtaatttgcccccttatttgtgggtggagcattagcattggtgaatgctccaccaaatcctaacaattcaacactcttagctaaatcttgaaatgcccattgtgttctcaattttggttgcacgaggttcatttcagtctcattggattcatagtctctagatctatccacacatgcagcttatggagggaaacaaagggttgcggcaaaagaaaaaaaatgatcataagcacaacatgaacttgaatgcttacgactgattgagagttagatagcaacctttgtcactttggaaaggtgtcgaggagctcttcaatactgagtggttgtttgttcaatttgaacacgtattgaagtagatatgatcacattttgttttgaaaatgttcttttggtcaatgaaatccgactttggtagttaccaccaccctaaagggttcctaaatggaaatcttgcgtttatagatattagccggctaaatgtcatggatgtcttttcatatgaatattctctcatagtagggtttatcattggaattcttgtcaatgctgctgtagttattggttggaatgattctgaagctacagtgcatcatgtaggaaaatgtatgaagaaagtatgaccaatatatgttttatcttgactttgtgtagatttcagggcatccag

SEQ ID NO: 116142 - DNA, 818 bp, Physcomitrella patens
  Intron number 1 from transcript Pp1s22_316V6.1 (locus Pp1s 22_316V6) derived from phytozome v7.0 (chr-ID scaffold_22; pos 1878761 to 1879578 reverse strand)
acacaagtccagctcatctttcaagctgtgaccaggtgagagctctgctggtccatagaatcgagaggttgagttgatgaggctctagctccctcatgcagctcgtggagagagtcacgtcagaagctaagcacgtagttttggcgtgtagttgacgattttgtattcgataggcgcacaggctcggtccagagtctagatgagtatagacagagtagtgactactccatggttttgaacatggaacgcacccactcaaggacattgttgtggtggtaaacaagccaaggcacgaccacgaactacaaaaaaaaacggccggttaaccacacaggggagcatgtgcccggttacaggtttcaaacttctgatgaggatcactcgttggttggagacgacgtgttgtaagttatgtggtagcatctagtgatagtttgtgaaccagagagcctgatgcatcccgattcggagtttttgatttagcagcttctttttggctttctagtcttattcaggattcgaatattgctgaagcaagacgatcttgtagtcggaatcatcatcagcagctgaactcgattatggaagaattctgaaaatgcagctgtggaagttaggaatgagaagtattaactccaaagaggaacgttttaggtatccaaattccaggaatttttcagactgagggtgaggagattgtgtatagcagtaacatgtgagattgtagatggacgctatgccaaggatatggcgcaggaagcttctctcgtcaatattcctgttcctgggactcaactttttcttttgcagattaagtc

SEQ ID NO: 116143 - DNA, 885 bp, Physcomitrella patens
  Intron number 1 from transcript Pp1s153_166V6.1 (locus Pp1 s153_166V6) derived from phytozome v7.0 (chr-ID scaffold_1 53; pos 878718 to 879602 reverse strand)
ctgtcgacttcccgcctggtcttaacaggtaatgtcgctaggttttatgtgttttcatccgaagtcaacttctactactacattccgttgaatgcggttcagttgctgtttcttgcgtttggtggtctcatgtatggattaggttaagtgggtggtcacgctggtgcgtaaattggttagaaattgacagtttaggaggcaatcatgtgcattaaatgtgccaaacattcagaacatcgacccacaagtttgcgtgagactttcaggtgtggctgtgtgaattgagattgtggaacatcgaccttctaatcgtatcacacattttgcagatgtatgtagagtttttgattgagaatgcaaatattgggggtgttatgtgagtgcatcggtggcgctatttaaattttttgtgtatcgtgtcatctcgctgtccctcatgttcttgtagcagccgaatcaacccgccgtctttactgttgcgaatctcgtagcataaattgagagtccatgactgtggcgaatgcgtcgctgtaggaattctttttgttagctgccctcttgataaaaggcaatccttcatggaccgctttgtatgtcctgcaagttctggagaagtgcacgttctgttggccgccttgtgttagtcagtgtgaaaactattccaattcgttgagaacaggtgatacaaccttttttctaaaaacatttttgcggtgtaccagccatcagcgagttctaggaaagctctaggattttcttcttcagaagcaatggcttttgtgaatcccagtttgttttgatatttgatgctttctttgcaatcaagtgaaaattaatccagttgcttgctgggcagggcttgtgaagaagctgaagtgccgatca

SEQ ID NO: 116144 - DNA, 778 bp, Physcomitrella patens
  Intron number 1 from transcript Pp1s12_395V6.1 (locus Pp1s 12_395V6) derived from phytozome v7.0 (chr-ID scaffold_12; pos 2806630 to 2807407 reverse strand)
ttcagatcgtgtggagcttgtctttccgaggtgtgtttgttttctgtcgctctcagggtaatgtgttctgtaccaaggaaagggagtctggtaccgccgagtggttgcagtgttgtaaagctttgtgtgtcttatacagttctgaagtttggtattgaacctttgagattaatgttccaactttcaaagttaccgtcctaacgcatctttgagcttttggtaagtggagattctacctaaacaatgaacgaaatagttttttttcgctctggaaaacatctctcttaaccattaccgctaggagttttctagaattgcagtctggagtcgcgaatcagtgtcatcatggtagctcccctctaagcttttctgtagacatcgccacttgctagctcgtgtgatcagcacagactaacgcatccagtgctagattaaatcttgtcatgggtaacttgtcccgacagcgccaaaatttgtctgtctacaagtagagtcggtttttgaacaccatggttgagatgccagtcagtggggttttgataagttgacaaagctactcgtcactgccgcctagaaacctcatgcctttagcgcatgcatctcctgtaaaacatcccgccctctatgtccaccccatcctctgctcaattctgcagcgtcatggtcgtcttctggatgctcatgagaattcgtgtcggcgatattgcgatctcactttgaccttgaatcgttcctgagagcagatttcggcaaaagcagccatctacgagtagacgga

SEQ ID NO: 116145 - DNA, 615 bp, Physcomitrella patens; identical to SEQ ID NO: 114865
  Intron number 1 from transcript Pp1s35_283V6.2 (locus Pp1s 35_283V6) derived from phytozome v7.0 (chr-ID scaffold_35; pos 1518250 to 1518864 reverse strand)

SEQ ID NO: 116146 - DNA, 517 bp, Physcomitrella patens
  Intron number 1 from transcript Pp1s58_172V6.1 (locus Pp1s 58_172V6) derived from phytozome v7.0 (chr-ID scaffold_58; pos 971914 to 972430)
aaacatcaggtgaggacgtttgtcgatttttttccttggttggagtttgaaaactactaagtttaaacaatgtaattttttttgagagaaatcaaattgtaaaagatgaaaatattgaaattctgctggttttgtatcaacttagactctcgctttaaaaacttttagtcgagagagttatgattcaaggtttccttgaagtgagcaagaaattccgctgtgctgccgattaggaagtctgggtgtagaaaatggttctctttttgtaaaccttgctgtgcgtaccgtcgcatgattttctagatttttgtaatttctctatttggcttatgaagaggccagagtagcgcatctccaatgagaccatcgaatttagtcgaactagtaatttttcttaagttaaaagttttagaacgagaacatgtcactcaattatgtcacgtttctgtactttcgctacatgaaagtaacttacagctgagctttaactacgtaggttcaggccgtgaggaggagg

SEQ ID NO: 116147 - DNA, 547 bp, Physcomitrella patens
  Intron number 1 from transcript Pp1s22_241V6.1 (locus Pp1s 22_241V6) derived from phytozome v7.0 (chr-ID scaffold_22; pos 1510536 to 1511082)
tgtggaacggtggtctgccaagtttgagtgctgaggttgcctccgttgtcttgttcttgtttccacgaggatttgttttgtgtgtttgctgagttgaggtagcgtgtagcattgggagttccagtttcagatgccttgcgtggttgtgagatcttgactgggttttcttgagtgttggaagagcgaagtgttgaattttcgcgcaggctttttttctcttgtggtgtgttgtggtgagttgtctttcgtagcttatggtttcgtgcatcgcgtgtagaattgggtttttgtcggtgagaaaagaggataatctacgaacttttcttagttgaaatttcgggctaggtttatggtttggttacttcaaatgagaagtgcttggcccttttggctgtcgattaggtttggccagcgtcctctgaattgcgctttgaccttcttcgtttgaaggttttcttgcattattatattctcaagacctaattgtgtttgactgatgttgtgaatttcatttcacttgattctaccgctctgcagcgttaccaag

SEQ ID NO: 116148 - DNA, 838 bp, Physcomitrella patens
  Intron number 1 from transcript Pp1s131_65V6.1 (locus Pp1s 131_65V6) derived from phytozome v7.0 (chr-ID scaffold_131 ; pos 252081 to 252918 reverse strand)
tggttacaatcaaaaacagggaagacacctgaaaggtgagcaatctcttcgtcacgatataagtaaattccaatcgttttgcactggataagaagcaagggccgcctctaccagtagcttcctttcgctgtatgaatctctctagatccaggcgtccttccgtcgtctaaagcccccatcaaacttccacttctctctttctctcgctcccttttctttatcttttccttctccttttgggcttctcgaaggagcttcaacgatagtgctgcattttaagtgcatcgttgattacccggggcaacgttttttcacgtgagcttcatgatttgcagcctgatcccgaattattgaatgctccgcatctgattctaagctgctcctgcatccttgtgctcgaaattatcacttcaggcaatccatgacggcccagatggcccgtgccttcgcaatcttgtctgtgtcacaatctcttgatccatggtgcaaacaactccacgttctcttatttaccataattttattttttatttttttattgttagattctaaaatggttcgacccaagagaatcattcaaagctattacaaacaaaatcccgcaaagttctggaattgtactactgcgtagttcctctcgtcatatgcgataagaattgcaagtgagaaaagtcgtgtttggaattcaaaagtgaagaactacgtatccaaggtacccttcgatgaatccaaactttggactctatgtctatgcatccaagtgctgagatcaaccctgattattgggtttgatccatttcaagttggcgccaagaggcaggtactgacacaaacagca

SEQ ID NO: 116149 - DNA, 373 bp, Physcomitrella patens
  Intron number 1 from transcript Pp1s50_98V6.1 (locus Pp1s5 0_98V6) derived from phytozome v7.0 (chr-ID scaffold_50; p os 1008442 to 1008814)
gaaaccgttgctatactgaaatcccctgaagcactgtaagtggtctacccaactatttcatttgccctctcgggtctgttcctttaagtctctgcaactgattcgtccatatgtagccacagccgtctgttatattcctggtataatcccgagattggccacaagtctaagagcattgagactgttctcaactttagcccgactgcatgtgaggcctcgaggccgttcattacaatcgacaattttctgtctgttcttctcaagatagaattattcactgtccgataattggtttattctgtccaggtactgactcatttgagtttgttttatctcagtacagaacagtttatcgtggagcgcactccacccc

SEQ ID NO: 116150 - DNA, 552 bp, Physcomitrella patens
  Intron number 1 from transcript Pp1s102_63V6.1 (locus Pp1s 102_63V6) derived from phytozome v7.0 (chr-ID scaffold_102 ; pos 433389 to 433940 reverse strand)
tgggagagtgcgcgatagcttcctctgcacaaaatgtaagcatcaatttatttgcaatcctccccagcttctttgatctcggcgtgtgggttttccgctctggatatcgtacacaaattcactaagggggataatgggtcttgtaatgcggccgttggttctgtttaaaatggtcgttacatttggcgacgatgggtatgggtttggtggacagacgcaacctcgtttgattatcttccgtagaattttggggctgtttaaaaaaaatgtgtctatgaattcgtggactgcttgttagaaatttcaaaaatggcgggtaaagattggatggggcaattcgaataatgttgcgaaattagaaaagtgaacatcgtagcgtgtttgctggacggcatccattctttatttgcatcgctatccacctcgctgtaatcgctactcccagtcccattcaatgaagtcgctcagtttcattgtttccttgtatttattttacgagatcttctgtgtcttgtaggggaagtgaagctggatcccgatcgtctcttacca

SEQ ID NO: 116151 - DNA, 898 bp, Physcomitrella patens
  Intron number 1 from transcript Pp1s203_71V6.1 (locus Pp1s 203_71V6) derived from phytozome v7.0 (chr-ID scaffold_203 ; pos 646629 to 647526)
gggccagcgagcagctcaaacgagtttctgttcaggtaaggactgtagaaattgtatgttgcaattgtaactgctgcctgcggattgttgctgcgtgccctgttgctgggggaatttgcttgagtgttaccaaattgaagtataagtgatgggtttaaggtattgatgtcggatgctggctgaatcggtttccaagtagaggtctggagagaattatgaaatgctggaggcggagaggaagttttagattagggtttggggtgactgtcttgatagattttgaaaagcacgaaagtaattattggattttttgtgtttgacttcatgctccttaatttggcgagagggcaagaaagtgtgagatcagtaaatatgttctcaggttttgagctgaccaagatcgatcgtaatgtgcctggcgtagactggtgtgaatgccgagtgaatgaggtgcttatcgcggttttactgatgttttttggtttgctgaatttgctgtctgttcgaatgttagtgggtttgggacggggcttattgaagcttattcgccggtcgttgtgcatatggtttgtttaatttgttcttcctcacgttatagagttcatagatgaatggtcctgtcaaattcatgtagagttgatgactttgtagctgcgggtattgagttagcggcgctatgattggttgctgatgattttctactagagttagaaacttggttgaagtttttttttgttttaaactgctcgcattcctcaattagatcagtgagatcattatcttccaggtcgattgagttcacatctgctgcctcgggtgtgataattaatcagtatttaattatgatgcatgagagggttttcttcagcagagctcgaatacggcgtattgatacagc

SEQ ID NO: 116152 - DNA, 520 bp, Physcomitrella patens
  Intron number 3 from transcript Pp1s271_34V6.1 (locus Pp1s 271_34V6) derived from phytozome v7.0 (chr-ID scaffold_271 ; pos 215952 to 216471)
gaaattggacggcagcagagatcctagtgttgcaggtaatgtggtgatgctgcacacaactaacgtattttgatttcatttcaccaaaaatgataacaataaaaatgaagaacaacaacaatccttttattggtgtatatgaagtggaggtaaatttgtatcctttttcgcatcttaacgccgtcacatagcttgtattacaatgactagtgcaaaattgtacttgagccggttacttaaatatagtgttaagtcgtatcataatcaacgcagttctgttccagtgatgaactcatcacttgtctgtagaaacgcaacactcctaaattctgccacaatcaccgtgcactttttttcttataaaagtagctttattcatatctgacgttgcgtatgtagccacgaacagcatgataactgaagatgcatgatcccagcactcgacattgtttgctggactaggagtactaatttttactttgcaggcagcgcgaagggaagactttgatagagttcgcag

SEQ ID NO: 116153 - DNA, 713 bp, Physcomitrella patens
  Intron number 2 from transcript Pp1s157_16V6.1 (locus Pp1s 157_16V6) derived from phytozome v7.0 (chr-ID scaffold_157 ; pos 114891 to 115603 reverse strand)
taccacttaaagcacgaaactgctgacgagaacaagtaagtgaagaaaaaaatgattttaaagagcttaacgtctggagatgcaaggctagaattggttcttgccagatgataaacttatgctctagctatcaagcatctaaattgcaatctggttcctccgcacagaactgaatcctttatcggttgaaggtatattggagagggaatcagatgggacattaggagggctaactatctgggagcattttgtcccatagtcgaacctggttttggaacctctactgtgaccccgagatagaagtgaatccattggcttgtgctgtctgttatttctcgcttctgtattgtcgcagtgtccctggtgccgcctagttagtgccgtttgatgtgtaagtttattacgtatacgtttctgatatgtccgaaatgtgactatttgagcgctgtttgaacattgcacatttcgaaaaaagattgtgttttgttttgtttttttttgcaatgaccggttactagctgtcgaatagctgaaaaactaatgactcaaagcatcattagaagctgttgtgtagaatcttgttgacggcttcacctctcttgtgacattcaactgggtctgcatctttttttcttcgtagcatcagcttccaacggctactgtacatatttcttgcaacgtcgcgagattttaaggttgttttcatggtagta

SEQ ID NO: 116154 - DNA, 186 bp, Physcomitrella patens
  Intron number 1 from transcript Pp1s212_37V6.1 (locus Pp1s 212_37V6) derived from phytozome v7.0 (chr-ID scaffold_212 ; pos 192335 to 192520)
caagcgcgtaaacaatcaaaaggttttaggtttttaagaagattgcgttttgtagatactataacttatgatgtcaatctagatgaaatccaaattttttgctagcgactgtatgacattatttgcattgacatgtactcagtatttggttgtttgtttgctatttttgaaattctggctgcaggg

SEQ ID NO: 116155 - DNA, 960 bp, Physcomitrella patens
  Intron number 1 from transcript Pp1s469_5V6.1 (locus Pp1s4 69_5V6) derived from phytozome v7.0 (chr-ID scaffold_469; pos 86368 to 87327 reverse strand)
tgggccttcgccgcttgcctgttcttcagtgcaaggtgccgtttatgtcagctgaatggtttctcctctttcgcgactcttggaaacatatatacccttttgtgttcattggaatgagttgtccgtgtggaccatgtatatgagtattgggatgttctccgttgtatttgcagattcgattggagcttaatgtgtggttcagggtttcaggagcctttgcgaaagagagacgatcaagggacgtgaaaaggttgatgaaacgcatgtaaaagcttgtaaaacaacatgtgcggccacattcttggaagttcttgtgatctgtcttctcatcagaactccagttggttgatcttgagtaggagcaagccctgtaatctatccaactgggatagataggaagtgattgtttcacacagttactaagcagaaggttagaacgtatgaactaaatgaagttcttgacgtaattgtctctcctactcttagatcacaagaatgccaagctttgaagtttctagtgatgcaggaaactgtgatagtacaccactttcttgtctttgatttgatattgatgaagattttccggtatacaattgctgacctgttgtttggtttagaaaatgagagaataaagaaggctaacaagatgaacaatctttttcccagttttactggaggttggggtgtattcagagttaatattcctacatttgcaaatcttccttcggttctgcaaaagagttgctgtgttctggttctttacaaatgaagggatataatcgggcctctgtaaagcattagaaattgagggacggtggccgttagacttgctattaaacagttgcaaagggacggacaacatccaagtgagatgtgaactcttctatccaataagacttctacagaagctgtcattttggaacagtaagaagggggaagaacaactggatcaaagtaagg

SEQ ID NO: 116156 - DNA, 941 bp, Physcomitrella patens
  Intron number 1 from transcript Pp1s74_61V6.1 (locus Pp1s7 4_61V6) derived from phytozome v7.0 (chr-ID scaffold_74; p os 350292 to 351232)
cgggtcagttacaagcgcctgtgcaaagtgagcactgagtcggaactcggtttgagtctcgttcattttttttccggaagtattttgtcaacttttcgtggatcaagtcgagtgcgcttagtgcctaccttgggctttgtactacagatccatgcgttttgtgggctcatgcacggttcatgtttggtgacagcaagtgttgatgatttgcgtggcactttgctcgagctgtagctgaacgctgctgttttcttgctcttaggtttctgaagcttttggaaggtgtgacagcccttgcatctgtctgtggttcttggtgtggcttttccggtagaacccaatttttatatgtatttttggatgagagggatttgctccgattgcatctgaactttttcacgttttcttttggtactctcacaagccgagcatttcaaaagtcgcaagatttggctcaatgtgacaaatttatacgattggttcattttcttttctttaattgtagcgacttgggggaattatttgaaagcaattttctgtcctcatgttattgtttttttcgctgttggaatgggagggtcctgtcgtccgcctgctcagatttttgttcgagtccgaggtgcgtgggttggttctgccgatttggttatgcgattcttccactgagcggaacagaattaactaatttttggaaacgtagtcaactctgtcattttttaaattttaatttaattttaaatttattttcttgcttcacttgctgcattaggcgcctctgctcaggatcaccttccgtctttagttcttctctgtggggattttaattcactttttgcgaacaaccattataagattcccgtgttttttctgtgctgctgaacacgtcctttgccgctattgtagcagcttttttggaggaataacgggacttaagcaacatt

SEQ ID NO: 116157 - DNA, 707 bp, Physcomitrella patens
  Intron number 5 from transcript Pp1s30_324V6.2 (locus Pp1s 30_324V6) derived from phytozome v7.0 (chr-ID scaffold_30; pos 2245240 to 2245946)
agctcgagctggaactccaaagagctcgacagcaggttttttcccttcacatcactcatgtctggccagttacaccaggtttctgtatgtcttagcggctaacgttcaaatgtctatccttgaaggacactgcttttctattttgatgcaattgtaaacctgttgcgcattacaagacggaaggacaattcgtaatcggagttttgattggtgaagcaaaacttgcagctttagtagtttttgtgacaattagtactttctagcttctcaacttacggagtacatagttcgaaggcgtgaatgccttcatgtcgctttgaatgtgcagattgacttttatttttatttccaagcgatgaaaagagaatgaattgctgtcctcttctcttgaaattcatttttattgcttttaagatatttcgatcttttaataagtccataaattcttttcttgactctatttaagcacatcaatccgttcgcgtacatttccacttcagggttcaaagggataaagaacggcatttcttcttggtcaaaattttgtttcatggtcttttagttctgcaaaaatctaaacccaatacacagaattcgcctctgtattttgcaaaggagtaatattttgttcctctgaatctgagtaagttaaatttatggcttccttagcagggtttatatttgggaccttcttcctacagcggcga

SEQ ID NO: 116158 - DNA, 641 bp, Physcomitrella patens
  Intron number 1 from transcript Pp1s65_244V6.1 (locus Pp1s 65_244V6) derived from phytozome v7.0 (chr-ID scaffold_65; pos 1439732 to 1440372)
gggtgcttgagctgaggtccccatttttgaatagggttagtagattctgtacttctgtgactcagctagcgatttcgaattcatgtttgacatttggtttaattgcagtgtatttgtgctcttggttcgaatttccttttggagggctgtggtttggttttttgggagagtttgtttctttagctcttctcagttgttcagtgtgtgagtaggtgcaacactcgtgctaagtagtagtaccctaagacgtctttgcagctcaagctgagtatcctccgttctttttttgtcttgcttcctgttacaactttgtgtccttgaattgattgaacggtggctgttgtcgaatagctctgatagcatcattagaagagagatgggtagcccaagggaagtttataaggaattagcagccggactgcaatgttctcttggctctattgtgcgcttgttcacattcaatggcacggataataattatacctttgtgacgaccaatcgaccttcagaatatccctcccagtcttctttttttctatgtcttgtttttcagcgatgctgctcattgagaagactcaaatctcttggatatttcatgccttgcagaatatttgatcttgaacggaggaaagtcttcgctt

SEQ ID NO: 116159 - DNA, 792 bp, Physcomitrella patens
  Intron number 3 from transcript Pp1s157_5V6.1 (locus Pp1s1 57_5V6) derived from phytozome v7.0 (chr-ID scaffold_157; pos 14309 to 15100 reverse strand)
agtacgcctcgaggcaagttcaactcctcaacaccgtatctcgcttctcaatcttcacttctgttgattggtttaacaacaattataactagggttggataatccttttcttacgcctaaagtgatcatactttctattgccagatttgcagatgcttgagctatcaaaagtttgaaccaaatactatatgtacatttccttccccctttggatcaaaattttgcatatgttcactcaaatttatttaattcagtcaacaatgttagctcttgtatacttgaataaaacttcgacatagaaagtactcgcatatggagagcctttgtaacttattgatgcttcggtatgacagaaagttagctctttgttcatttatcgaatccgcactcaaattttgttgtgaaacagatggatctttctaagaatcagttttcaagagctataatgcatacactttttcattgaagacaaattcctgcttgaatataccgtgattctgtttgactatgcatgttatataaattaaaacctgacaattggagttgcagtgtgcacagaaggagatgttgccaacacattattcatcgtgtttactgggtcagtcaaggtgcattgttgatgcaaaaatccaggtcttcaattacacgccagtcatagtataaattttacaatgctgtgattctcgatttcgttactccggtcgagcttttctttttactgtaatccttatcttcatggttgccgtgagaaacgcaggccactaaacgtattccagggcagcaggaggataa

SEQ ID NO: 116160 - DNA, 764 bp, Physcomitrella patens
  Intron number 1 from transcript Pp1s387_48V6.1 (locus Pp1s 387_48V6) derived from phytozome v7.0 (chr-ID scaffold_387 ; pos 277673 to 278436)
acgtgtaagtctcagctaaccaaagtcggactgctcttactcaattctgatgtggggaatcgtattgttttgcaaacatgtcctcactcgtcagtcttccttatttccttcccgcttatttgaagtttgttggcctttagttaattctgaagatgtcgtttgagaagctagatactttttcggcgtatcagtttatttgaaagctgtgtttttatcagctgtattgatatgtcgtctgtcatctggaggaagttgtgcagtgattgtgaattcgtcatgttttcttttgattgtcatggtcgttattgttcatagatagaaatttagacttaaacgtggactggaagcatcatccatcgatcaaatcaagaaagtcagtaatttcgagtagcatgaaaattctcctgcctcgtgtggtaacttggaaatcgacatcctgtttgtgtataacaaatttcaagtgcagtcgttaagataatattgtttagtgcttgtcaaggtttctgaagtgacatgtctccgtgagtgaaaattgcggttgttgtagttgtgatcgacagcacgttagatcatagttatggttcccgtgatttgctgaatttttgcccagcgtatggtcttttgttacacgtaatactccttgtgtcagtgttgccgatagttaaatcgtatagatgaaatttctaggcttctgactgacattttattagaagttcagccgtaactgatctattgtgaatcccttgtatgcaggcacttcaaca

SEQ ID NO: 116161 - DNA, 957 bp, Physcomitrella patens
  Intron number 1 from transcript Pp1s36_321V6.1 (locus Pp1s 36_321V6) derived from phytozome v7.0 (chr-ID scaffold_36; pos 2137353 to 2138309)
cggcagcgccgcagcttgccccctttgtgcctcaggtgcccttcctttccgttctgttttagtgtgtacgactgtgtgtggcatttgaagcttaaagtctacttttctgccactttcacaagcgtttttgttattccggtcgtttggttgcatttcgaggatcgatgcgaaggaatttggagtgcttagaggttttagaaccgatcctttacgcagattaggattttgtgtcaaaattctgttgcactgaatggcggtgatgattgttgtttgttgacattgtggggattcagggaatcaaccctggccttgtcaacatctgaggttgattggaaggttctttccgtgtttgttgatgatctccattgctttggtgttttgttagatgagtaaatcagactcacggttgcgattgttctaacttgttaatgtcatctcgtggagcgaagttaggtctttggtctgtctctcatttgaatagttaatgctgcgaagtccacagaggattttgcttacgtccagcgattttattgaggtagctcccgtttaccatcagacgttagagtagtatagctgtgacgagtgtgcacgcttgcatttccttttcaatcaccatattggcagatgaaatatcgtttgactcaaataggtagtgaccgcacttgtataagtgcttgactatcttctcctactgtggaatttattgagaaatgaatcaggacatatgataagtgtgagtaactttgtagattttttgggtcttaatttcatcgggttagacccgaatcaaactcacatgaatagacttgtgcaggaggaagcaacttccacgttatgcatgggtgtttgctaggagctttcaatgtcgagccctaggccctgagttttcatctgagcgtttgcttgtccctgtgtgatacagattcaaagacgagaagttccaagtgttaactactc

SEQ ID NO: 116162 - DNA, 938 bp, Physcomitrella patens
  Intron number 1 from transcript Pp1s69_14V6.1 (locus Pp1s6 9_14V6) derived from phytozome v7.0 (chr-ID scaffold_69; p os 124606 to 125543)
ccattcggtgccttgaagccggagaatctgtcctggtaaacttcctgtgataccttctgctgtcgttgaggtttttaattgtgtggattggttgtatcctcctctgtaattcagaacatgttggttgtgccccccgcgtgagctggaaattatgccctggaacttgcattgttaacgtagtttattccatataatcactcaaatgttgtcttcatagtttcgcaagtcaagacactttgaattcgaagttcacaagtatgtgtactctggttgccctcttaaattatgttgcagtcataatttctggctggttatcgctggatccaactttggctctatctttcgcttctccatcaagcagacgtatctatgagtgattcggtttttaacctttctgctgtgtttctcaagtgtcacaaaccggggagcttgaggttggtgttgtttattcgaggcaattttctattctagccatgtgctacccgctgttttgtttcttttcgtgacagagcagcgaccttgtcttattgtgttattgttaactcgcaattggcacatttgttcagcatcgtacttgaactgcagtatatattttggattttccttttaactaggattctatgtgctttgcactaatgcaagggacttattcatcttgcacagtttcaaatctggatatttaatgtttatcgaagtacaagttgacacggcagaagcttgatagtcttaatagctgatgaaagagttttacaaacattaatatctgatgactgagattacaggtcctgaagtaagagtcggagcttggatgctgctgaagtgtgcctcatattttgattttcaaagcaattcggcgttagattatttgcaagatagagcttcttatgattccgttgtacacaggtatctgcacacacatctgctgggaaaacggttgt

SEQ ID NO: 116163 - DNA, 925 bp, Physcomitrella patens
  Intron number 1 from transcript Pp1s42_87V6.1 (locus Pp1s4 2_87V6) derived from phytozome v7.0 (chr-ID scaffold_42; p os 711604 to 712528 reverse strand)
caggtagtacaagtgctagacagaagaaacggcgacgtgctgatcgcaatactgaagcaggtttggtctgcggtccgcgtagacttgagtaacattttaaaataactatattctttacgtgtctttgttcattggaagaaagttttccctgaataagacttagattctgcgagaatgatcaaaagggtgaagatttatgtagtgattgagttgggactgtaccacccaaagttcgagaacgtccttttattcggttatgatggagcagtgtattcacaccctgattctatcccgattagaaacccgtgttgttacaagcacgtcgtttttgcgtatcaatcctgttaccacttaaggtcaaggcaattcatttttgaattgtactgcggattttgtcccttggatggaatagttttgtctgcagcatgtagtaattcagttcgaaagatcaattgtcttgatatttttaccggagacgagttatgtcgttgcaaatgacacatcgtgcattccatctctcgaccccaaactaggcaaaacctagcgtattttcaacattccattttccacaattgtgctgactttgacacagctgacatgttctgtaatcgacatggctgacgttgacatagctgcctcgattatttcttagagtctttcgttgttgataaaccggaaagtagagcatggttgggtcccgacaatggtagtgcggggtccctgttagctgcgttctcattcaacttctgaaacttgcggtcttttgagtgtttagcaacttgtgttttgtagtctttcgtgtgcttttgaaagaattatgaaattttgcgtgctgtttcattacttgtgactctgtggtgtagctcgtgactgacatattttcatgacagttgtggagggcgtgtcgaagttgttaggcggtgcg

SEQ ID NO: 116164 - DNA, 568 bp, Physcomitrella patens
  Intron number 1 from transcript Pp1s217_72V6.1 (locus Pp1s 217_72V6) derived from phytozome v7.0 (chr-ID scaffold_217 ; pos 466106 to 466673)
gacagcgttctgagccttcaggttgttaatccggtttagcgcttgtggaaatcatggttgcagtgttgagttttttcctgcgacccgtacatgaattttgatcctcactggtgttgcaactcttacgtgggcgtttttttggatgtcttagaacatggtctctgcgtccccattttggttcggatctgaaatgtttgtatcgtgctgtaatgatgtgtttggggtaacgttggaaggtctgaaacgatcatctggtcattccatgcaatttgtcctgctttgcttccgaaacgagaacacactctacactgattgatattactcctgccggatttgaagtgatgtgtctcctgtactactatctgcagccagtaaatctgcttcttttttatttattcgccacgacgataggtgtaagcttttggcatgtcttccgatatggaacgcttttccagttttgtatttgattattataccatcctttgaaaccgtttacgcagtatgtgccgactcgtgtgttggaattcgttcaggctgttggcagcaggcgttttgtgttgtccttcat

SEQ ID NO: 116165 - DNA, 719 bp, Physcomitrella patens
  Intron number 2 from transcript Pp1s795_3V6.1 (locus Pp1s7 95_3V6) derived from phytozome v7.0 (chr-ID scaffold_795; pos 3137 to 3855 reverse strand)
cacttggtcaagaggttagtgcttcggtattcattaatgttcctggattataatcagtttaaaacaagaatatttgtgatttgcttaggatatggttttctgtgaaattgttcttttttatgtatacctattgaaatgcaacaagatatctgcgtattatcacatctgagtccttagaccagcgtctacaaattagtgctctaggtaagcagtgtaaagaacctgggttcaaagcattaaagaatattttaaagtactatttcgtttgttgaagttactagcaacatcattagaacctctggcagtctgtgtatgcagactttattcgctcatgttctatctagacatttcttttctgattgaagagcatgtggttgctgaccatccttcatgtcatttgtgacgttcttggccatgaagtgattatgacttgtcgattagtgccacttatagttgagtctaatttgatatcgtgtagaagaagttaacgatgtgaaggtaaccatgatcttctttccctctggtctgtgcgtcgcttgtctcataggaggcttgtaactatatcgtgttggattattttagctagatggatttgaggtacaaccttttaacctaggacagagagcaactcaatttgtttgaacagccgtttacttctagagagaggttttgagttcctctcacatgcatgtcatggtaccttctccaggttcataacg

SEQ ID NO: 116166 - DNA, 893 bp, Physcomitrella patens
  Intron number 1 from transcript Pp1s50_24V6.1 (locus Pp1s5 0_24V6) derived from phytozome v7.0 (chr-ID scaffold_50; p os 315972 to 316864 reverse strand)
cgtgaattgtgaatttctctcggtgagtagaaagatgctttgagaatcgtcgtttggtctgcttcagttgggaatgacagggttggaataatttttgtgatcaattttttggttcgtatgagtacgttgtcgttcggattttttttcttctgtagagctaaatctgagtgcattccggctttcttctcgacttgactggcgttctgcgattgaagcgcttcatgtcgaaagacaatgtctttacttagggtgcattctgtcgccgtttagttgtgtctcttgtaaaaataaatctgagaaacatatactggtgtgaatttcacggtttcgaatcttgtgtggaggtttcgtatgcatactgaatcttggaagaattatattgtaattgtgtttcttggagagaagcagttcccgtcgatgcctggtgatttgtagtcggtgggtctcatcgagcgtcagtagatgaccttctgctgctttttaacccatcaattgctccctatatgcagtttctcgaacactttttgtttggataaatttagttataatgtgattatggtcgaagataaccgtcgagacagcttacacatgagcatctgtcttccttcagtcctagccgatttaggtcgatgtgccaaatcgcattgtatctgtgattaattctaggaaatccaagcactcctcgttcacatgctctgattttaattttgatttacatctatatgttttgatgtactgataatctctctcaacttctgatgattgatcgatcatacaaagctcgaacttttgagatctaacaaactaatttcaataggtgcagaataggttttcgaggagcgagttctgtgtgagtgttttataacattctgtcatattcgccattcttagcg

SEQ ID NO: 116167 - DNA, 1022 bp, Physcomitrella patens
  Intron number 1 from transcript Pp1s70_203V6.1 (locus Pp1s 70_203V6) derived from phytozome v7.0 (chr-ID scaffold_70; pos 1238119 to 1239140 reverse strand)
agtggagcattgccgcagctttcactgtcgtttctgtaagtcgccgatcgccgcctctcgcagcttgttttctcgctagggtccggtgtttttatatttaaacattttcgggcttagttcatggttgttgttgttgttgttgttgcaacttggttgtgcggcgtgagtgagtgcctgattgttgtacatgcgcagtcgggtgtaatttattcgcggagtattaactgtggtttgctttcagagtatatgtgcatactttttatttattttttatttttggagtgcttcgtagtccttgagtgtggaaggtgggcgtgaagggagtggtcgtgagggggttgttttgatccgcgtgctcctattttatttattttttcccatactggagaagaagccgccggcagcttgctttgcatagtctcgctgctcgctcgtgctggccgtagcctcacctaaggtagtacgctttagaaattgtgggatcgcacgatcgcttggttgatcggcgatctgagaaagtttcctacggaagtcgttgtgttggaacttagtaagaaagaaagagagtctcatttccaggcgttgcttcagcgttgacgtggtccatattctctcattccctcttcttgaagcatttttccagttccgtctcgggggtctgtagcagccctgtggttctcggctttgggatcgctacttagcagcttgctttgttttggttcaccttttcttctattccaccttcgaagttcacctacttctcaggtcttttagtttctatttcggagcttcccaatccccgatccccgatcgactctctccttgagtttaagatttgggtgctcagtggggcttctgtagggcggcgagtaattttcttggacttgttttctttgcttttatcccccctccatccctcgtctcttttcttttaaatctggttgatttctcaacttccctccctttctgtttgtcaaaacatttcagtgttacgtcaggcctgtgattcctgacgcatagga

SEQ ID NO: 116168 - DNA, 247 bp, Physcomitrella patens
  Intron number 2 from transcript Pp1s22_64V6.1 (locus Pp1s2 2_64V6) derived from phytozome v7.0 (chr-ID scaffold_22; p os 430503 to 430749)
caaccatccgagcgtggttcaaggattacatcagggtaacacagcatcttgacgtgataatcagagtatcttttggccagcttgaaaattattcttatttatttaggttgttgttgttgttgttgttgttgttgttgtttttatttatttgttttgttttgtttttttcttcctgaactttgtttggattttgatgatacctttgcgagcagacaatagtgacgagggtgaacaccatcgggggagt

SEQ ID NO: 116169 - DNA, 877 bp, Physcomitrella patens
  Intron number 1 from transcript Pp1s173_123V6.1 (locus Pp1 s173_123V6) derived from phytozome v7.0 (chr-ID scaffold_1 73; pos 680392 to 681268 reverse strand)
tgaccgtcccggctcgtactctctcaattccgcaggtacgttagtgtgatttgatctctggatgtttgtttctctgcgggtggggttagttgtcttattggagggttgggattagacagaccgcacttgttgtgttcatggcattaggcgttttttccgcggagctcaaggatttgtgttggaccgcaattcaacgattgaaagaaaagatagtctgtgacataggacatgtttcgctttggatccatacgtagattttttcttcagtcgattttgagacgctcgagcttcatcctgttaggtttttaaaagcttcgcagggacaggttaggcgctttcgcgttaatgtaggcgctacattgcttacatctgagtacttttaagtgacacacgtttggaactggttatcaatgtctcattcatctagccttggctgagactgaaatagccaaacctccggataatacccggcattttgagaggatgatgaattttttttatgttttgaatttgtcaaattactaagtttttctcatatgagaactttgtctcgtagaagtagtctacaatttgtatcactgtataacatggctcagagattcgaatttggggttcgattcaccttctattgacatttgacacttggaatcatctgagagaaaaaaaaaagaaaaaaaagaaaaaaaaagaaaaaaaaagaagaagattggctctgattcctctgtgagtgtgcaaaaatattgtaagaaaaggacgatgaaacgtttgaatgtggcaactactgcagaagtggacatggattctacgcgcgtacttaccgatagctgttgcattatctgcaggtcttggagcagctcattcaagggacgaacttgac

SEQ ID NO: 116170 - DNA, 953 bp, Physcomitrella patens
  Intron number 1 from transcript Pp1s7_235V6.1 (locus Pp1s7 _235V6) derived from phytozome v7.0 (chr-ID scaffold_7; po s 1285844 to 1286796)
gcctctgtgcatcttgacgttgctcgccgcttccggtaatgctcttctatcccttgcgatgatgtctttttcgctttggtcggtgggcaccaaactcttgtgtttgtgacccctttgaaggaacctcgtttagagtcgaggttacttatggtcccgatgcgcctctccgctggtgtttctcctgttcttcatgttagcgatgtgcgtttgttagttgatctacctttttttttgtaatttttgaattttgattttttgattatatatatatatatatatatatatatatatatattgtggaggtctcaattggcttgttaggttaatggagtctaggatctacgtgaattttgtatgcagagtccagatccttcggaaattcttaacatctcacgagtaggattgtttgtatcgatttggagtggtggaaaggctgtgtactttttcagtgaggaaatacgaggtggttcatgaatgttagggttagtacatacgacgtaagttgatactggaagctgagtgttcgtgtgcaaacgtgtagtgcaaattatctgatgtgaacaaatttaaggtcctgtcatacattttaaagctttgtgtggattacacgatggttagtcggtcatttgggtctcgtggcgtgacacggtcgatagcgcgttatttgtaagcttctcggagtgtgttccgatttttgaaacttcaggagggagatttcacggttttcatatgtaggattttttacaattttgaagtgtttggattcgtttttgtgtgtttctatagacatttgatttgctctccattaagtgccgcatatagtttccttcaagattcatttatctaacacgattggtttagacagctgtgcatttgatgttgacaattccatcttcggctcaacaacttcctaacttcaatactctgattttcttctacaggtgctgccgcag

SEQ ID NO: 116171 - DNA, 671 bp, Physcomitrella patens
  Intron number 3 from transcript Pp1s41_98V6.1 (locus Pp1s4 1_98V6) derived from phytozome v7.0 (chr-ID scaffold_41; p os 804730 to 805400 reverse strand)
gcactaagctgcaagaggtatgtgatgttcttccattacccgtaggaaatatattagaattcattccgatttttttgtggttcatcaatagaactattatctatgattttggcttgccagtgtatgtgctagcaagcatctcagaattggatgcttctgcgcaaattcttgggacttttatcacatgtatttttgatgtttctttttttgcatagttaatagtcgtgcgcctctacatcaaccttcacattgtaaaatcttcgttactttgttttgctttcatcgaaaacttaatttatataaaaggtttcaaatattgtgaaatatttatgagagtttttgaatgcagctgccttacaaatgaataagaatttgctgatagattcaaattatgtgaaagttaagttcgtcttcaaagtcggttgactttttagaaaatgcgttttgagcaagcatggttcttgttaatattcatgaatattgatagttttcacacccaagcttgcaagggtaagtagatgtgcacttttttgtgttttacctttggaaataagtaatgaagccgcctaaaatttggtctgcttcgtggctcactggtatgtaggccaacattgatcatctgttttgtgttaacagcttcgacgtggagtagaacgtgcggagatatatag

SEQ ID NO: 116172 - DNA, 653 bp, Physcomitrella patens
  Intron number 2 from transcript Pp1s177_39V6.1 (locus Pp1s 177_39V6) derived from phytozome v7.0 (chr-ID scaffold_177 ; pos 193574 to 194226)
aagttctatactcaggtttgcacatcaagttcttagcatgttgagctcagaatttcttgatttgtgttgcacagtactattcgtgtgcattctgtacgttcagcaaatatatgtccatattcattacacatcaaagcagttgttaattaatttttcatgcatgttatggttacctcggtgaactgtgttttgtgtgcaggtgagtctccaggagctcttctctttgacttcttctccaaggcgatggcctctttctggtttctagaatccgttaggtgttcatagttgcctctttgggggtttcaggtttttcgtttcgatgttgtagaatactcttccagtttaaacctcatgtatagcttctcataaggttgttgctgctgaactgtggaggaaagcatttggacatccagttcattttcgcaatactaaagtactagtgactggtagaatcaactagtttacgttttcgttaggttattttactagagacgttttcttcagcgtccatacatagcatcgctactcagttcattgtggcccatttcatggctcattcaagcttccggtgtgacgtgcattccaaggctgttcactactgaacgatatgtttcttttggttttgctcaatggagcatgttattgcatatcag

SEQ ID NO: 116173 - DNA, 767 bp, Physcomitrella patens
  Intron number 1 from transcript Pp1s153_98V6.1 (locus Pp1s 153_98V6) derived from phytozome v7.0 (chr-ID scaffold_153 ; pos 623947 to 624713 reverse strand)
cttcctcgggtgccatttgggaacactactccctggtcaggcattgtctctctacctgccgtttcttacagtgctctataacctattttctttccctcatttgggctgtctgtggagcttgggactggggaagaggtggacaggagtacggataggagattttttttgtgcatgtgtgatttcgactttccagcaacgctcgaagtgcaggttggttgtgggtagttcgatcttttgtgttgggatcttgggttgcttgccatggggtggagatgagctttgaggtggctttcggtggaggttgcgtcttgtgcttgtttgtttttgtatatacacattattgtaagtgctgtagtttattattccttttttgtctgtttcttctatgggtgcttgttcgtgttgacttggttcttggtcttagcgtaagcatcatacacgtactattcgttgttgtttgagggcgcaattgctgaacgaatctcgataacgttgtctacagctgttctgcagtttttcggggttatgatgggcgctttgttagatatggagcattttagtaattggggagagttcttcgttaggaccgtagcgcagagtcagcgaaatgtagcacagtgtacgtggagtttttttgggggggaacatctctcctcttaaggagactacctctgtattgtcttgcagcttgaaggatgtacgagcctgcttgatatcaaaaccttccgtggattttgtattgtgtaggtgatcttgtagaagccaca

SEQ ID NO: 116174 - DNA, 714 bp, Physcomitrella patens
  Intron number 1 from transcript Pp1s67_107V6.1 (locus Pp1s 67_107V6) derived from phytozome v7.0 (chr-ID scaffold_67; pos 789564 to 790277)
cggcgcctacacatttcgtcaaccttcggcgttgggtttgggtttgcgtttgttttgcggaatgaatcaaacactgggttgcgcgtttgtttgtgcgtgtaagtgtgtatatgcatttgtgtgggtggtgggttcccagcgcacggccgtctctccacccccctcactcctatccaatctcatttgtctgatcatgtcgaacttttccaaaacgataaaaataaaaataaaaaacacatacttcattcaccagctgtgatcgtgtaatgaggctgttggcaccgaaactccccgtgcgctcagtttgcctcgattcaactcccgaaatcaaagacgaagaagaagaggaagcagaagaagcgggataaagaggaaaccgcctatctgtattgtttctattatgccagaggtataactttcaacatgggaaaagaaggtcaacattgtctttttcgaggagcgcacaaaactgcccgtgtctttgaatttttcttgccaaaggagtcgatggttgcgccagcaaccccactgttttggcccaccgtacattctctgccactgttgctgctgccgccgccatcattgtcccgacgacaccccccgcgcgtttttttttgtataatttttttataatacttttttttccctattgcttttttctccgctacgctcgtgaaagggtctctcgtacacctcctgtcgtcgactccgttt

SEQ ID NO: 116175 - DNA, 555 bp, Physcomitrella patens
  Intron number 2 from transcript Pp1s256_42V6.1 (locus Pp1s 256_42V6) derived from phytozome v7.0 (chr-ID scaffold_256 ; pos 246478 to 247032)
aggttggtgattcctcttgccttcctacaaatttattattctcactcgtttgttttggagtttagatgcgtttggttttccactgacgcggtcatgcgaatttgttttaattttttttgatgtgctttctttttctgttcatgtcccttgtatcaacgacaagaaagcttgtatttttgttttaattttttggatttaatctaattgtttatttatttgtggatttgcaaaagcttctctagcttatttgtccagatgtctttgtcttagtcggtggctaaattggatttcatacacagtcgattcagctactcttgatttagttctctattagccatttatcggttaccgtttgtgggtcagaatgagcttctaaggtctacgatttgtgagtattctgctgggatgaatgggatcgtcagtgaattaggattttgagggaatgacacttttgaccttggttagcttatcatagcctgtctctctgaacattttttcaaattatttacatctagcttatgaacctgctattcaggtcttgacattacttctcga

SEQ ID NO: 116176 - DNA, 850 bp, Physcomitrella patens; identical to SEQ ID NO: 115834
  Intron number 1 from transcript Pp1s2_677V6.2 (locus Pp1s2 _677V6) derived from phytozome v7.0 (chr-ID scaffold_2; po s 4138609 to 4139458)

SEQ ID NO: 116177 - DNA, 651 bp, Physcomitrella patens
  Intron number 1 from transcript Pp1s22_164V6.1 (locus Pp1s 22_164V6) derived from phytozome v7.0 (chr-ID scaffold_22; pos 922486 to 923136)
ggctttgcaggtcaccgggtgctcttgccagtaagtttctttgttttttttcttcgattcttgacttgagtttgcaccgaccatgcgttccttcgggtgttcctgtggatgccgagcagatttttcgagtcgctgcatcggtaggttcgtgtttctcctccggtagggagacaaggatgtggaatgtgtgcgaagggctctgaacgataatgcgtgaactaaggtggaagttttgcgagtgattgacatgaggcgtctcgggctggtgtcgggtcaatgctgccgctgtcattggtgggcaaatttggacaggatgtgggctctgcacattaaatctgttggttttcgattgggtatctttgaacttcgtggttgcgtgatagttgtgtgaaggggcttgattaatgcaccattgcttgagtaattttgattaaattaattggttgtggagacttaaaagtcgttgacctaatatgttttatttttatcccgcggagtctagttttaaggaattgaaacagccgtaacaaatagcttgtaaatagtgagtatggcgtaaaatcgccgaaattggcgatgtgagcttacctttccggaatctgttgagcatgtgcaggaaatattctgcacaaagatacatcggtgactgga

SEQ ID NO: 116178 - DNA, 762 bp, Physcomitrella patens
  Intron number 1 from transcript Pp1s335_76V6.1 (locus Pp1s 335_76V6) derived from phytozome v7.0 (chr-ID scaffold_335 ; pos 322072 to 322833)
gcgtgaagaagaaggcggaccgttattgcaagtagggtgtgggctcattcatgttggcgcctgaagcttgcgtgagttatttttctcctctctgttttgtaagcttaaaccttttagttctctgaggaggttagggttggtaggttactgccgttgtttgttttattctatttttatttttttgagtaccctgagcgtcgtgcgtagtatgcgcgaaggctgtaggtcgtcatcgctaatggtcggcgattacatgaagccagtatcggtgcatggtggtcaattgacttggttgtaattttagggtttccgaactgcccctctactttggtttttgttggtttgtttgttttttttctttctttttttctccctgttaattgggagtgtcggtataagtagagttgagagtattaagttcactatgcatgaaatctgaaagcattggttacggggtgcaggccattcaggtggtgcattctcctgcacatctgatttgtaaacgatgaagtattgagcatcctattttgtacatgtgttgaggatttgttgatggactctgccattgtctgattgcaatcattggctacctgtctgtcccggtttgtaatcactacaaagagctatgaaggtgtagtggggcttttgtgcgtggtgatgaaaggtgtaacctcagcttgagcgtatcatagccccgtagttcttcttttgtctgagtctaacttttgactcctgcatgtcacacttagcagtttccccaag

SEQ ID NO: 116179 - DNA, 747 bp, Physcomitrella patens
  Intron number 1 from transcript Pp1s190_37V6.2 (locus Pp1s 190_37V6) derived from phytozome v7.0 (chr-ID scaffold_190 ; pos 316058 to 316804 reverse strand)
cactctcctgtccctctcaaggtgtggacgtgaccaattctctctcttctgtgtttttggttccacgcttctattagaaatcgtgagcgtagcaggtgctgaagaggatgacatcgcgttctggtatgttcaatttttgtggtggccaagtcactttgttactctggaggtgatcaatttgtcagtaattgcgtttttcttcaaacctcggaggtgggaatagggaggatggaggagggcggatggttaattaggttttttttttttttttttttttttttttcaaacttcgtttatgcctttgatatattggttttcatttagatgtttgtaatgcttgaggctgtagtcggctttgaagctcgattggggatgtgctggtctttgagcatattttaggaagtaatcataatttcaatatctgcttattcacgtcatgattggactcagttgtcgtcaagccctggctcacctactagtggtttaggttgtagattcggggctttgacagtcggtttacgaaatttacgtacagagtagtatatcgaagtgtgtattggctaccaattcaaggatatccgggtggtattgtaagggacgagcgtattcagtgttgaatttaaaatttcgaaaaatcttcaaccgtgctgaaatatgtattgtctatttcgcgcgatctgcagtctttgtttaatctccagtactggaaccatgtacaggtagaaaacttacgatcaggtgctcgca

SEQ ID NO: 116180 - DNA, 586 bp, Physcomitrella patens
  Intron number 1 from transcript Pp1s84_294V6.1 (locus Pp1s 84_294V6) derived from phytozome v7.0 (chr-ID scaffold_84; pos 1482676 to 1483261)
ctgccatcgtacgtcgagaatttgcccactgggtgcgtgtaatatcattcttttacctcgtttcctgttggtatcttgaggacctcggtaaatcgatggtcttggcagggcgattaatttgcaattggcggggagaaattcttgcttttgatctcagttttggaaaaatcttttggtatgagaattgttactgtgtcgaggtgtggaccaagggttcattttcttcgagaatagtggatccggaacctgcatgcgcattggaaaagtgttggttatgagtctgtgttttttgaatcggaaatcccaatgaacccatgccatttgattagggatcctaggccttgaattagcatggaaacccttttccgtggagacgtttgttgtgggaaacaccgagattaaatgctgtcgacgtatttcttgtagtacttggtagtttgaagctcagttttttggttctattgttttcttgttcagtgacgtgtggatataagaatattttttcatatttttataatgcatttttccgtggttaacgttcgtacttgtctgcatgagacttactcctcttctaattcttacaggg

SEQ ID NO: 116181 - DNA, 1034 bp, Physcomitrella patens
  Intron number 1 from transcript Pp1s324_22V6.1 (locus Pp1s 324_22V6) derived from phytozome v7.0 (chr-ID scaffold_324 ; pos 146674 to 147707 reverse strand)
cgccatttgtggtggcaagagcttggtcgagttaggtaggtgccgtgctatcggtagcgttttcttaattcgctttctgtgtgtcgaagtttggctgcgatggctgtacatcgaggggtttgcaggagttttaagcccggtggtctgtgcttgggtcggtagatgaggtctgttcttgaaccactagagtctgattctggggttttattggcgggatggatcgaataggagggtggaatggattgttcagtgttgattcgcaaaggtctctgttttgaattgggtcttgtgcttcatttagttcacttatttttgttttttaatctgtttatttgtcttttgtgctgctttctgcgtttgcaaggtcttttgttcactgagtttagaccagggctcgtgatgaattgaataccttgcgcggtaatctcggatgaattcatcattagcaatttgtttccaggttcaaccgtgacacttttcggtgtgtttgtgccgacaacgaagcctttgtctcaggacgaattggcaatcaaatgtactttgccaagcgatctgagttaaagtgcgagaatgctgtgtaatttcctgatttgaggacagagaccatttctgctgactcttaacctagtttgaaaaatattagttagtcagaagggtagtcttcctccgtatctgctccgattcctctgttttaatgccgcctaacgtgaacgtgcaatcgaagtcttggatcttgattgtaccattgttaaggttcaatgaacttctccgtcccatgtttttgacattatctattcctcgtcattatagttaaggttcttagaaccccaatgctcttgaatttgcaactggcaggaaaaagttttttgtcggcgacgagtgtagcaacctgctgaaaaatctatgtatccctgttgtcttattaccaatcaaggccagaatacaacgtcatttgtacctattgcattaagcactgacctctcatcttctacggtgcaggttttaaacgaacaaaatcttcgaggaggaattta

SEQ ID NO: 116182 - DNA, 308 bp, Physcomitrella patens
  Intron number 2 from transcript Pp1s28_268V6.1 (locus Pp1s 28_268V6) derived from phytozome v7.0 (chr-ID scaffold_28; pos 1631002 to 1631309)
gaaggggacaacataattggactgactcttgtgagttctacaacttctcttgcaatttaatccgcggttaataagagtctgttcaggagatctcgcaatcgatcacgacagtcatgacttctcttttcttaggattcaaaatgattcctggctgccctggatagcggatgcgttttgaagatttcacgtgttgagtttcctgcggagagaaacagcgaacagttggagttaggaatggtagcaatgtcagagactagggctgcctgcgaatttgatcatttaaaattttctttgctgagatgttcagg

SEQ ID NO: 116183 - DNA, 489 bp, Physcomitrella patens
  Intron number 1 from transcript Pp1s69_68V6.2 (locus Pp1s6 9_68V6) derived from phytozome v7.0 (chr-ID scaffold_69; p os 429720 to 430208 reverse strand)
gctttcgctaaatacgtggaattattgcttaacaggttcaaatttggccacgttttttattttatttttatttttttgttttgttttgttttgttttgttcgatgttttgaataattatcgcattttaatcttgtgttagctgtgagtatggttgttgattgccggtgctgtagaaaatctcgaatcgagtttgtgtattttgaagttgggatagtatttttgtgtctgctttgaagatttttggtcgattgtgatcagtgtgcgaaggcttgatggcacgctcaatccggcgctaaatgcagtttgaaatatttttgctgtttttcatactctaggtttgatttgagtttgtggttgcattttttagatgttctttctatgtcaattcatatgattaatctgaaacgtttatgtcatggtgaattgagaattgagcatcgtttggttcgacagaggaggagcgagagtcacttgcattgcacctccca

SEQ ID NO: 116184 - DNA, 864 bp, Physcomitrella patens
  Intron number 1 from transcript Pp1s222_40V6.1 (locus Pp1s 222_40V6) derived from phytozome v7.0 (chr-ID scaffold_222 ; pos 198618 to 199481)
tggtccaagtcgctgtcgctctgcttctgtttacagtatgttgctaacctaattctctcgaagctttgtcttctatttttcccttggatagtatgttgctaatttccacagagacttcgttttcactatctaaataaatccccgtttaagaatatttaaatctagttgtagaaatttgttcaccctcgggaccttcagtcttggagcagggtcgggtggaacttggtgaatagggtcatagctcggcaaatcctagatgaatacgtgcgacattttatgtctgaagctatactcgcgattattcctccgctaatttcaccatgagtatgcctctggtttgttacctctagcggtgaggtagcgaccctaaagagctaatccccatccgttgccgtttgagcacatgatcggcacaccatcatcttctttcgagattctctcatgagcagcgaacattggtatagtagggatacattgttcttgggtgtcaatttatatatgaaaagcatctgcttctaatttgaattcggtgcgggctctaggttaaacatggttgctctacttattccgaaaacctcccaagacgtgagctctagaaataaacaagtggcggcttatcgcctaattactgttgaccgattagtgtgtcaatttttcacatactcgtgccgaatctgatgctcaagcggttaaggtatctttggaaggactatgatcaggggtagatttggttgggttttttgataattgcattgcaagcgtttatacacaattttctttcaggatacgaattcggtttgataaatgaacttgtgcttctttcgagcaggtaaccggtcaagagggggtagtacagcagccacc

SEQ ID NO: 116185 - DNA, 827 bp, Physcomitrella patens
  Intron number 1 from transcript Pp1s37_39V6.1 (locus Pp1s3 7_39V6) derived from phytozome v7.0 (chr-ID scaffold_37; p os 240302 to 241128)
ttgtacgtgcgctcttgattgctttgtagtactagtcgtttcttttcttttcttttctttctttctttctttacttattttgatggttttagcgagtctttaggactcgtcgctggttgctcatatttgctagctcggaaagatggaagtcagtcctagtcatattgtattttactggggtcgtgtcctctcgcaacagagattgtagccgtagtctataatgatgcacgtcatgctgtctcttcagacattttcgttagctcaatgataaatttattttgcatcgacgcaccctgccatctagtgttcgaaacgtgacagtgtctctcacggattgcttcagcggtaattgaacatttacgacagggtttgtgaattttgtgagcgttatctcgttggaaaaaatgcttgaattttgctttccgacaatctaggacttagcaaggatggataagtttcagttttgaatacttactgtttcaagtctgtaaaagaagctgatagtatagcatttcttgacctgattcaattgaaaatcctgtagtttaattgaaactcttaatcgatgatccagcccatgtattaagcctaaaccaaatctgatccgtataaagtcttgagttttattttctacttctatgttgtgaacattacggcttttgaaaaaattatcggaatgttttcagtcaattatttggacctgggagtttgagcttgctgttgcattgattttagctttccgttcggtcatagtgaaatctgtcgttgaaaattatttcttagtgaaaaatctgatttttttagattcgatgactgtatgcaacagg

SEQ ID NO: 116186 - DNA, 768 bp, Physcomitrella patens
  Intron number 1 from transcript Pp1s30_340V6.1 (locus Pp1s 30_340V6) derived from phytozome v7.0 (chr-ID scaffold_30; pos 2360468 to 2361235 reverse strand)
agtgattgggtgtgccatttggaaaaatcgaacaggttgagaaaccatacgatttctaaagtacgcaattgagtagtcaattcccgatgtcaaagaagaaagtgcgttgacctcgacaaattgccacttcccgcgatgttcgatctgtcactcgaagtttgtcatgtctttgctaattattaactaaacataactctggtagagtagatatttgtttcaacccccgcatgtgagagttattctcaataaaccaaaacgtaggtttaaaattcaaacttgagaattctaacattgttgaatttaggttttgtactatgtaattttttttcaccacgaaggtttgtcacgctctttcacaggacattgaagaatttagggcaacatattttgaatccaaaaccttccgtttttccccaaaaaagctcttttactctcaccatgagattcactgaacatctattcctcaacctgaaaatctcagattctcctttcttccacaggagacgatcttgaaatactctaatctgttgcgttttcaaagaataaattcccagatggaacccacatttgatccttagaattcgctgacaccagttcatcccagttgttggcagcgactgatatgatggttatcattcggtcatgaaattaaaaacaatgaactgccgtcagtgaattgttcattccctagagtcgcacataactaggctttgcctctcggttttttttacagattgagggcaaattcagttgctgctgactgctacc

SEQ ID NO: 116187 - DNA, 782 bp, Physcomitrella patens
  Intron number 1 from transcript Pp1s109_211V6.1 (locus Pp1 s109_211V6) derived from phytozome v7.0 (chr-ID scaffold_1 09; pos 1162552 to 1163333 reverse strand)
aacagtactcagaaaaaaaagtggaattaaacaatgtaagtggacgccatattctgaacctcttcaaattctaagtttgaatcgttattgaataacaaacacaattttgttcgtaaattttaagcaattaaaataaatgaatgaatgaaagtacactcttgtaacttgaggcaattgctgtaattagatcaagggaagttgactgtatgatgaatggaggtattctggcttgtgctttgaatcggaattagaataatcaatcgtttctcgatagattacaaaaacctgtggaccatttcctgttgcgatattctacggttggctcgattagcatagaggtttgtacaaatcttttactacctctacacggtgaagtcgagactttgctacccgacatcatgtttttacttctgaacactgatttatctaattttctataataaaaaattgagtgtctggtgtggattgagcacttatttgactcgatgtcgagcaacgcctacagcttcctcggagacatctactgccatctcccctacagattcgttgcgaagtgaatcgtcatcgtgctcgttgcgttcattgcctttgccattgttatcacaacatgatctcggagagctagttcttatttctggtgtagtttgagtgattccttttgagggtaatgctaccagttctacctagcagtggagcattagggtttgctgctgaacactaatttcgtggttgacatgaacgggacagacagtgagctgtgttttggcgtgggcggcagcgaa

SEQ ID NO: 116188 - DNA, 1050 bp, Physcomitrella patens
  Intron number 1 from transcript Pp1s201_95V6.1 (locus Pp1s 201_95V6) derived from phytozome v7.0 (chr-ID scaffold_201 ; pos 530205 to 531254)
gcgacgattcacacaacctgtcatcacgtctccaggttcgtgcatctgggaacagttctcatgcgatcttgcatattcgatgcaggtgttttgatttcgtgcgcgtatctttggatgtatgattagggaactttgcgatcgctgatcgtttattgttatacgtaatgaggaatgttggttattcttgggtttatttagagagggaatgcaaactaccccttgaggattcaaaaattgattctcgaattgcgtgggccaaggcccttgcaacaataccagttgacgcacccggaagtagatacgagggtttcgactctaattggggtaataatcaggtgatctgcacccgtcatcgtagatccattagatggcatgcgcacaagcgcaggccagggtaaagccgatcccagcaaaattgggttgtattatattcttcgtcagtctgtgtcgtgtctggctgtgatttattaattctgtctaggccaactctgtgtactgaccccttgcaatgaaagttattctcattagtgttacaaaaaaaaacaaaacaaaacaaaacaaaaaaaaagaaaaaaaaaaagaaaagaaaaactgattctcgtagcagctacctcgcaactgcatggtccactcttttgctcggtgagggtttgcacacgtaccactgcccccaataaaagtgatgaggctacattggctgagtaggaatggctgttccgcttacaccgatatttttttttgcatgctgaaaagaagtctttctgcatgcaaaaacacgaaaaggaaaatctcttgaggtgggcggaaactgcgaatgttcttatctccgcagaatttgtcgaggcatccttccttccgttgaccacgaaaacacgatggggtcgcaatttcagacaggacccagttcgtgaaaacccgtcgtttcttgtaccatgatcaactctatcaatgcattgggtacagttccgttaaagatgtctgggcttgagtgaatttttaactgtatactctacagatccccacgttgcaatttgtcatatagtacgagtc

SEQ ID NO: 116189 - DNA, 935 bp, Physcomitrella patens
  Intron number 1 from transcript Pp1s89_32V6.1 (locus Pp1s8 9_32V6) derived from phytozome v7.0 (chr-ID scaffold_89; p os 78859 to 79793)
gtctaggtatggtttcatcacccctctggcatgctttctaacggctgtgacaatttttttttttctctttcttcatgtgcaattcgtggcaccgattggcctgacttgtccatgctggcgtcgttttcttacttcatgcgctgttatggtcctggatccacacattgttctcgctttgctttcgacctctcagtcaaacacacaattaatcaatgtttcctggctgtggcataacatcaaacaatatggagaggtttgatgctaaggagcagtttagattgtgaggattgtggaggagctattccaagatgtgcaacgatgcagtggagtctgagatgttcttagagtatttgtataaattaattcttactgggaagttttcgacttcttcttccattggagtggggaggctgtgttcgactttgcagtttttgacacgagtggatcaaatttccatgcctgcctgaatcttgtggaaatgataacataatcaaaccccctaactgtaaattcttgtcatgtaagacgtagtgttgctgatagtggttcttgcgatcgccatacatttggtttctactctgaaggagctttgaagtgtcgattgtgaatggtttaccacacgtagcataaatgaatatgcttatatttattgggatactggaattctagcatatgaatacgtagcagtagtcagcagtgaggtacgatttcaggtccatgctgatcggttcttaatggtggagttttgttagcaccatgcacagggaaacttccgtgctttgtatactcttaggcttgtgtactgcttctgggtgcttcagaatggctttgcttgaagttgctgtgaagttgattttacaagtgccattaagctctaattctagtgactgaatgatgcagatacttgagaggccagagttccataactctttgcg

SEQ ID NO: 116190 - DNA, 923 bp, Physcomitrella patens
  Intron number 1 from transcript Pp1s33_341V6.1 (locus Pp1s 33_341V6) derived from phytozome v7.0 (chr-ID scaffold_33; pos 2057521 to 2058443)
aggtttgtgagctggaacctcgtgtgatttcgtttcgttcgcctgctgtcttgcttgctattgggtttttgcatgctcgagggttgaatgctcgcttcgggttggttaggatctttccttcttgtatccattttttttgtcttgtattgattggtttgtgggtattggtgagtttggttcgtggatctggtcttgttgagtggagttgggtttcgggcgtcgctcgggttgattaggacgtaatttttttgttgattggttaggtttgtgtaagtgattgcgtatgtccctttttagtttcgttacgttttgttttgttttgttttgttttgttttgttttttttttttttcagatttgagtgatgatgagtaccgttacaaaagatttgtttagaagcggactggagtgtaggcttttggtcgatattcgagtttgatttgaagtggcccggatcccgcatagggtcttcttttttctgatccgtttgaattgtgtgatttttctgtttaagttggaattctctctggatgtatacccacaattgccacaaatctaggtttggcttagctgtggtgtctattgtcaacccgcatgtctgtcgtcgattaccgactggcagacgttcgtgctcctagggtaatctagacttaagtcagatcaatttgcagtatggtaagagtggttgtgggaatgcacggcttatctgctactttatggactttttctggagcttcaatgtcatgagcttaatccattctgttgtgttattagtcacctctgaatcaccttttgtatgtcgctagttgtttcgaacacctgagatgtatttaaactctttacatgtacatttctttctgatttttggttgtggattattgtattgcagctcgaaggagaaaccgacccttgggtacgtgctga

SEQ ID NO: 116191 - DNA, 546 bp, Physcomitrella patens
  Intron number 5 from transcript Pp1s248_26V6.1 (locus Pp1s 248_26V6) derived from phytozome v7.0 (chr-ID scaffold_248 ; pos 231034 to 231579)
tggtcagtgacgacttttgcttctgaaagaagctgcctgctgaagtttgatttttcgttaaaattttggcaattgttgaaatgattcctttggtccactatcatctagtatggtgctcacaagttttaaacacattttatgacgtaattttcaattcgttcaacgggcgtttctagattctaaagagtaaagggcagggatgatagtctatcgctccgtccacgttcctctttttttgccacctttagtttagccatgtattgttggctcctccttgtgttgattgttttattgccttactaaagatattaataagccctaagttggaagaaggtttgttaacctctcaatcttttcgggcacgtcaagaaagaatcttgggtccttacatttcttgaatgacgactttagtactaactgcaaatgcaagttttccatgagtttgcactccgacgattttactctcatcttcttctttgaagcataacaaaatagtgccacatgttgagttagatgagctggaacatttcccgcaggtggactttt

SEQ ID NO: 116192 - DNA, 317 bp, Physcomitrella patens
  Intron number 1 from transcript Pp1s398_19V6.1 (locus Pp1s 398_19V6) derived from phytozome v7.0 (chr-ID scaffold_398 ; pos 217377 to 217693 reverse strand)
tacaggcaagtagccttttgaatattcatcatagttttcaaagccatcttagattttagcatgatgtagggaagcggtagtataatggtctcttcaaaagtcgagaactgagatgttttgtcaatgatgggataatgatcttattcatcatcgagctgtagtgtttctcaaaggacatgtgttgaatatctcataagtatttatagctcgtgctgttgcatcggagcacagtgtgtatgttttccaacagcaaattgaaggtgactatgattcgcggtgttcttacgcggtttcctcactacccgtgcaggttaagt

SEQ ID NO: 116193 - DNA, 705 bp, Physcomitrella patens
  Intron number 4 from transcript Pp1s193_49V6.1 (locus Pp1s 193_49V6) derived from phytozome v7.0 (chr-ID scaffold_193 ; pos 512615 to 513319)
gccacatttgtcttggtgagtgctcctcttctgttagaccttctcaggtgtttttcggaagtattttgacgtatcagagagtttattattgcaggttaaatgctaataataagtattgtaagttctggatgaagtgaacttttgatataaatcataatgtcttatttgttggtatgaacaaaataaatagaaatgaaggtcttcttctaagatggtgcccgaaatacatttgacaaaattaaatcgctatactactttaaaatgtgataatagtgatttttttttttttttttttttttttttttttttttggaattgtaacatctcctacatatttcaattgatagtattcacattaatttttgtaagagagcgagttatgcatcgtttttacatgttttacatcacatattttaaacaaagtcaaattcaacaaacctcttaatttaacaatttttcattaatgaatgtggtattatgtcacaaggtgcaaggtgcagatatcatgcttgattttttgcatattgggaagactggttcaattgggaagtagggtggctgggcgaattcccattgatatgttagatgaaaagaaaaatcatagaatgaagaacactcgacgcagtcatgagggagagtggtgcacgttaatgaaatgatgatttttcattctgggatttatttttgttcaaccagatatattgt

SEQ ID NO: 116194 - DNA, 795 bp, Physcomitrella patens
  Intron number 1 from transcript Pp1s102_147V6.1 (locus Pp1 s102_147V6) derived from phytozome v7.0 (chr-ID scaffold_1 02; pos 937455 to 938249)
ttcgtcaagctggtaggatcttccccttctactgtagcttttctctggggttcttcttcaggattttccaacacgaaatagattttgaacggcaagtcacgaaacgagattgctttcatagatgatttcgacgcatgcaattggagcgtagtaatgtttcatagaaccttgcccccaaagttcgtcattcttgaagtcgaaatcaaactccgctccaacgacaatttttcctttgcttcagaaaagtgtacaccagacaccttaccatctgtaaaccctgcagtcgaagagtaagagactcggctttcgcggccttttcatcacaaattccatatctatgagcaggttcgagagagacagttctttcgtatattagatgctcgattgcttggtctggatgtttcacaaagtttttttttttttttttttttttttttttgtttcatcttttccggtggttctaccttctccttcactttctcattctggtcaatgtctaaggtctatttgtgtaattttattttatttctctcttcttctgctttttggaggttgcagggtttacatttggttttctcaagatttatacgctgtttctcacgagttggttttgtagtgcactattggttgcacacattttgaattgttccgtttttagatagtggggttataataataattggagcaggctttacctgaaagaatatacaacacgaaaggagtgtgaactaaagatcgtcccttcgctgtttacacacagattccgagacttttaccagttgcagtgatcggaat

SEQ ID NO: 116195 - DNA, 684 bp, Physcomitrella patens
  Intron number 2 from transcript Pp1s158_153V6.1 (locus Pp1 s158_153V6) derived from phytozome v7.0 (chr-ID scaffold_1 58; pos 762142 to 762825)
agagattgacgtatccgtcttccgattcactctgggtaagcagttacggaaaatttatagttgatgtcgtttaccggggctagcaattgcaattgcagttgcacaatttttttttttttttttttttttttttttttttgggttatgcctgaagattgtggttcaatttgtttgcagtgggctgtgtgtccagtgtaacctggaacttcacaattggtcgtgcagaattattgggacacgtatctgcattattgatttgtgaatggatgaatctaaattcaaacatgtaaaacgagttctgggaatgcagtaggaatattcccacagttgtaattcgagtgcttgtattgtgaattgagacgatgaaattggtgtatgtcaaagccttgttacaaagggtagtattttctggttctgtgtgcggcgtatattgcgtagttcaattcaactagacgaaaagtacgattatcctttgttctcggtctgaagttttggtttctgatctgttccaacacttgttcagttcttgctggatgtgacgttcgcaagatacccatctttgtttctgattcgtgtcacctgaaggccggtgttattacacgtgactagagcatactacaatactattaccatgatatgtatgatggttcatgtgaaccctcctggcaggcatacaggggtttg

SEQ ID NO: 116196 - DNA, 858 bp, Physcomitrella patens
  Intron number 1 from transcript Pp1s16_65V6.1 (locus Pp1s1 6_65V6) derived from phytozome v7.0 (chr-ID scaffold_16; p os 388600 to 389457)
ggccagcaaatcgagttctgtttcaataaccaaaggtaatatagaccctattctttacagaaaaaaacattccgatgccagatgagatcagtacatttagtcactgttgaggcgttcacgcataccctattttttttaaagttgtcgtctctaagtgtcaggtgttgaacttagcagttgggtacagtacatttgcacttctcacattgtgttaacgagctgaggaaggtatttgcaaacggcgatgttttacaatacttcatcagccctgtattaagtcagcctggttaggggatggtaacttttggagtcacaggtcagacgtaatgacatcttcactaatcttatcttatctttgatttgttgattgggattgtatcaacaaattttactgacatactgttattccttgtggggatcaccctatctgagttggtatcacaacaacacgcggttctcaattggtcttgaaaggcgtgagctcaatcgtatttactacgcccacccactctcacttagaattcgtttctttacaaaagtgcaattcaatcatttccctgtacctcggtttgtgctttgtacacgatgatgtagagaccagagcgatgtgtggaagggaatatgcaatgataattggggttgtgtggaagggaatatgcaatgataattggggttgtgtggaagggaatatgcaatgataattggggttgtgtaaaacattttgaaatccgaaattatggtcttactggtgtatttacccgcaagatggcaagtcaagcttattctgcagctctaaccttgcatcaacttgggttttgtacagatattcattcattgccgaagctcacacccagtgcg

SEQ ID NO: 116197 - DNA, 479 bp, Physcomitrella patens
  Intron number 1 from transcript Pp1s114_137V6.1 (locus Pp1 s114_137V6) derived from phytozome v7.0 (chr-ID scaffold_1 14; pos 814121 to 814599 reverse strand)
tttgccgataccgacttggctccacttgtcaaacggtatgccattcttcttgtttccgggctttcatgcgattctgcagcaagtttcatggggttttgtgaccatggatgtggcttgtagaattgttgttgttgagaatgttgagatatttttttggagggttttgaggattttttttttttttttttttttttttttttgcgtagaggattttggggtttaggaaatttgataattaggagcattttttattttttatttttatttttgtcattttgtttgtttgtttgtgtgtttgtgtatttttctttttaggtgttgtcacggattttagatttttgggattcttctgaagagagtaaggatgtttgtgaggtgggggtttttcttttctctttttctttttcctgttttctcttcaagagatttgagtgaagatgtttggcgagggcaggtactcggcgagtacgattgtgaca

SEQ ID NO: 116198 - DNA, 358 bp, Physcomitrella patens
  Intron number 1 from transcript Pp1s508_12V6.1 (locus Pp1s 508_12V6) derived from phytozome v7.0 (chr-ID scaffold_508 ; pos 53263 to 53620 reverse strand)
caatagcaaatttcataggtatcattctttctcatcttttcttcatgttatcattatctatgtcactttgctttgtgataagtcttttcaagattttattgatgtactttgtatttacttatctacttgatattgaataaacacaagctaaattgtgactaaatagtttgatagtttctatttagtttaatctaaaattttaatgaatgtcatctcaattttgtttctatttattatattaaaaagagaatcatacacatatccaagatttagaggatagtgttaatgacaattctaagcaatttagaagtaaatattaagacacaacttttttttatgtatagtattttgacagtac

SEQ ID NO: 116199 - DNA, 664 bp, Physcomitrella patens
  Intron number 1 from transcript Pp1s477_11V6.1 (locus Pp1s 477_11V6) derived from phytozome v7.0 (chr-ID scaffold_477 ; pos 148646 to 149309 reverse strand)
cagcaaggctgctcgtttgcagtaagtattttgggtgttatttttggattatgtttgtgcgcaagtagatattactgtggccattttttcctgtggctgtcgtttgtattttgtttgcgtttgatccaagtttacgtacccacccgttggtgcagattgaacttttttcggattaattgggtgcgtaatgatggagaatagagtgcaagcgcacagcgatagctagggaatctgatgagatgcacaattgaataacgatactgcagtggatactttgactgaaagtcataataattcaaatgtgttcgaaatcatgcagattttgtctttggatgtttgttgagatttgagttttcgatgagcagctgtaaattaattgtgtagatgccgttccttcagtgagtattcgcggataggaaagtaatggataaaaacttttcacacatgtttctaggtacttcgaagtggctttatttttattgacaaccagtctagttcaaacgggaacttgttgagttcccggaacagtactacacgaagttctgaagacaactcttttgcggacttgcctattttgatattcagttttatgtattacaatttactgactactatctgatgtattgcaggtgcccgaagtgtttagagcttaaattgccgcgtg

SEQ ID NO: 116200 - DNA, 774 bp, Physcomitrella patens
  Intron number 2 from transcript Pp1s41_263V6.1 (locus Pp1s 41_263V6) derived from phytozome v7.0 (chr-ID scaffold_41; pos 1871576 to 1872349 reverse strand)
caaggtttgattcctacattctgcctctcaactttgatttcaggatcccgctgaagtggttggatagtattgagcattacggtgacgattaaaattcatcttggattactgatactgcatccttagctgcaatttaatcgtctccgtaaatgcatcgaatgcaggtgtcgtgtcaaatagttccgatttaaatgttttacggcgtcaaccctaaattgacctcacattaggtagcatcctggaacaaagtattctctcatcgtcaacgcctcgttttgcaccatacgttgaagcaagaggttgtacaagtatggatatcttcagctttcttcgagtagatcacatagtatgcccacacttgaacagcactagatgcaggttaataatcaggagttagtattatcagcaatcatatttcagtatacgctttaccgtttcaccatgggcacagtagtggcgattgctgcatgaatatcaagatacatatccacttcctgttttgaattatgcttacgttaccatgcaataacaagagttggttgatctagtcaatgtacactctgtcgtgatgctgtcttttttttggggttttttgtttgctgttttagcatccgttcttttttctttttcttttttgtcaaaattgattctccattgatgatcttcgcgtccctgagtcaaatttttgactgccggtttcgaccttcctcatttcttaaatatgtttgttgtaatgcaggtttgttagagagaagaacaagcttttggaagagg

SEQ ID NO: 116201 - DNA, 780 bp, Physcomitrella patens
  Intron number 1 from transcript Pp1s30_140V6.1 (locus Pp1s 30_140V6) derived from phytozome v7.0 (chr-ID scaffold_30; pos 936182 to 936961 reverse strand)
tcaggaatatcactatcacgaggaacagcaccgtgagtgatattagttgaataaacacatcatataaatctaataaagaagcagaagaatacaagcaccaaaaagctgacgctgcataagattgttacgagcaacaaactcgctcatagaagtctcttggatttattagttaggcagatgataatcatataggttgccgttttgttgttatctatgtttcggtatgaaagctctgcaaatatcatttagatttcagcgcttcaccttgacaaatcaagaccaatgtgataacagctgcgcatcaaaccgcctgttgtgcctgacagaggccattaagcataaatgcctggagttttaaaaccttgaagaatttctaaagggcactttgttgggcaggcatgtttttgacgaggaatactctcaagcctcatgtgcgcgagacaatgaggatgagtttgagattcttcttgaacatggctgaactacagtattttgtttcaggtcgcagtttgtgcacaattttttcacagtgagtaactttttctcttaagtacgagcgctcttctgcaatttcatgttgaccgaaatgcactttcatcaggctccattagcagaaaataacagggaacaacattcgtagacaaaccagtacaaatttgttttgggttgaagtttaaattgcagtctgaaacaagcagatcactccgctaaatcctcaacctgggtggaagcgagggcagttaatggtgatgaatgctgacaatggtggtgtgtttcagg

SEQ ID NO: 116202 - DNA, 572 bp, Physcomitrella patens
  Intron number 1 from transcript Pp1s20_57V6.1 (locus Pp1s2 0_57V6) derived from phytozome v7.0 (chr-ID scaffold_20; p os 268512 to 269083 reverse strand)
ttccaaagtgtatatcaggtgctccttgcttctaggtaagttccaattcttacatcttgattgttgacaaagctaagtatcatgtaagtctggtaaagtgaatgttctgcaaatttgattataaattttttcttctcatacacagaatattctaatcagccaatagaaaatcacattttgtttttaagaatgattttagataatattgaatatcaacctttgtaaagaaataacttgaacattttaataaggccaattcgtaggattttgtttaaagctaaggaagagagaaatatagaaggagcaagctcttgaatatattatacaaacaatggccttagaatgtgtttagaatgtgtttttgacattctaggtttgaagttgttctaattcaatgtctcctaaaagttatgctcttgcaataaatttatacttgaattaaaaagacaatggtttacatattattgacatattacattaggatgcatacaacaagtaaaatacctaagtgattgttgactaatttttattgacatccatcttgaccatgttttgaatattagagcctcttg

SEQ ID NO: 116203 - DNA, 889 bp, Physcomitrella patens
  Intron number 1 from transcript Pp1s121_166V6.1 (locus Pp1 s121_166V6) derived from phytozome v7.0 (chr-ID scaffold_1 21; pos 1152309 to 1153197 reverse strand)
catcactggaacggcacggattacgatcaagtaagtgcggttgcaactagcattgtaacattcaaaaacattatatgctttgaggattcaaatataatttccgacaatagcctgagatgattcattcatttgtaagccatcgtaagtatccatggatgttttttgtttaattcagatatttgctgtgcagatacttagagaatatccaaagctcgaaaacatttttaggatttgatgtggatccagtagcacattgtgaggcaaagtctttatttcttcataagtttggttgtgaatattgtattgaaaattgtatgcttttgatatgtgccacaggtaacagaggagcaactcacagcttgaaaaggacaactcactgtttgttgaagtgcctctgattcgactgaaattgtgatgttttggacttttagaggtgcactttgtgtacattaaaggttcatctaggaaaccttccagatacagctgacaaatgcgacgccgagttgttggaatgtatttcaactgcgtttgacggctactccactaaaaagaaaacaagttcccgctagcataactgaacccaagcaacttatttattatgagggaacatgaacagctagtaagatattgttgccggtttcaattatgtcagttgcaaattatgagtcttctatcacctgaatcttttcctgtcctggttttcaataggaagttgagtagtgtgatgtaatggtgaggaataccagacactcagtgatggtgttgatcctgcagtgttgaagctgatcggagattcacgagttgtggtggcagaaagtagcttcaaacatacccttgaacttgctcatttccaagttgtggagatatcagggaacccgtgcacaggaga

SEQ ID NO: 116204 - DNA, 643 bp, Physcomitrella patens
  Intron number 1 from transcript Pp1s24_205V6.1 (locus Pp1s 24_205V6) derived from phytozome v7.0 (chr-ID scaffold_24; pos 1992433 to 1993075 reverse strand)
gagaacaggtgtgttgcttcatacctctttcttcaattgtttcgatcaatattggggtttttaacgggcagtttgcagagattcttttacatggggtttagagcagagtagtgctgttttcaatttgatagcagagttgatttttatttttattttggaacaaaacaaggagtgatgtacaatttgggctttgtagccgtcaatatagtatgtatggtcccacccccgaccatatttttgaaatgagggtgagcttcttgattcaagtagctgatcaatctgggaggagacgacttgtcaccacaaatccctgtgcgctgcttcaaaaaactacattttgaggctttccagggttaaattgggatctaggacatcgattttggaatcaaaccgtttcaaactatacctcgagattggtaaataggaaagaagtgaggcttttcgaaatgatttcgcatagtactctggacagtatggaccgcgttacccaggtataaattcgtcctcgcgtgttttagtggacttcgttggacatgtataaaatgtgattgagaatatgaactttggtactgttcacttcgatattacggacttgataacacgaacatgagcttcattaaggtacttcatcactggcaggaaa

SEQ ID NO: 116205 - DNA, 939 bp, Physcomitrella patens
  Intron number 1 from transcript Pp1s21_141V6.1 (locus Pp1s 21_141V6) derived from phytozome v7.0 (chr-ID scaffold_21; pos 1063907 to 1064845 reverse strand)
gtcgcagcttgaagcaagaggagtttgattggcaggtaagttggggagatcgatgtttttttccttcttgggaactgggttttgctcgtttgcttcttcaggagatggctttcttctgtttgatgtcacaggtttggtgagtgccgagggagaaattttgctctctgtttggcattttttggtgttaacgtgaaagatttgggttcttgtcggtgagagacggggagctcgaattttttatgtccatgttgatggttgtattcgtgctctagaaaggtactgggagcttagtactattgggaagattaaccttcagaacgtagattgtatggtaggccgctgtgattagaactctcgcattttttgaagctctcagtttcctagcttgtgaaggtaggaaactgagagcttcttagtttctgtggtgtggcacgtgtggcttggtacatgtgtctcgacctcatgaacggagcttgttattacgatgttgtaggggttagaaccatcagggagttagtctaaacttcatgtctgtcattcaatttactgatgttgttagctctttggatcacagccttttcaaaatctgttattggtgtttagatcggatctgccactttgcggctctgcaaacatcgtgtatgcagtggtacctctgctctaaggttgaagtgagtaattagcagagtgggtttctagtagagaggtcttcacgctaagtttcaatttgggcatcaggatggactcaagggatggtatttgacggaggacctttggaaattggactcaaatcgtgtctggaagcctgttaattagttggttttcagcccaggtcgagatggcgttaatccactcaaaactggcctaattacaatcatctgtgtatcgttttcgcctccattgcaaaggactcacgcacagcaagttgcaggaacgcaa

SEQ ID NO: 116206 - DNA, 746 bp, Physcomitrella patens
  Intron number 1 from transcript Pp1s338_47V6.1 (locus Pp1s 338_47V6) derived from phytozome v7.0 (chr-ID scaffold_338 ; pos 275843 to 276588)
aagaggagaaggcagcggagaatatctacatcaaggtctgtgcgatgtgatggtgtttggtgtgggtttcttacttcattttagtaatctcctaggaatattctctagcgcactgtggctagtgtacgccgttcttggcgtcttcatagatgtgtgtattggtactcgtttttgtcgtagagtgattcttgttggcgctagtatgttgcggaagattcaaactggctgatcgaaaatgatacaaaccatggaactgtattgttgtgtcacgatatttgtaatatgcggtgtctggttgaagttgattgcgatgattagctagatttcgctttgtaatacgagctagatttatctatgatattgattgaagaattctgcatgtaccgtttatgtctagattggaactgtcttgtaacgttgaattccttgtttttttacattgatttaagtgtcggtagcattttatttgtatatgtattctgcaacgtactggttgcaaacagttggcattcagaaagtaagagaatcttctgtccgcattatcaagcaggctgcttgtgttgaataggacaacagacctcgtctaaggtctcttgttattggtatattatattccttcaggatttaagggcctagaattttcaaggttttgttcttgtttccgttgtatcgatttctcgatacatccggttagatgttttgttttctttatcttctttaaagcaattcccactttttgacagaaa

SEQ ID NO: 116207 - DNA, 901 bp, Physcomitrella patens
  Intron number 1 from transcript Pp1s74_122V6.1 (locus Pp1s 74_122V6) derived from phytozome v7.0 (chr-ID scaffold_74; pos 799417 to 800317)
ccctcaagcgagcggaaggtctcctgaaaacaccaccccttgcattttcctcctcctcctcctctctctctctctctctctctctctctctctctctctctctctctccctccctccctctctcagtcttttcattatgtttctgcagaacttccttttcacctttccgcgtcgtgttgacttagttgattctaggagaggcgttggatagagctcgccgatggctgttcgtgccctacaatttcttcatttttcgtaatttgttgcttttttcagttcgctgtttgtgcgcgtagtgagtgaacttgattgcttatttggaattcgaaaagaatgatcttgtttgtttgtttgttttatttatttttgttttgttttgttttttaaaatttttctattgtttttattatatttcagcatacaggtttcccacaattgttgatttagtctcgatcttatcttcgtcggagacgagttacatttttcgtagtgatgatcattgatcattttgcaatcaagaagttttttattctatatagtgtacgtcccaacatgttgcagttgtttagacgaggcgtcctatcattgacagttctgttaatgattaggtcgcaagatgttgatgactttgtgacctgatcattatgaccagcttcctcatttaattctaatggtgtggtttatttacatttatgttatcgatttcgatttttatttttattgaatttgaactcagtctcgcatattggctgccagtttatactggatcaaggattggatcgctgagtttacgacatggttatccggcaatgtgtgactcaagttgcccggtcttcatgccgccgtgtatcttgtatgccagttgggttaatttttggggttattactggttgcagagttg

SEQ ID NO: 116208 - DNA, 1056 bp, Physcomitrella patens
  Intron number 1 from transcript Pp1s87_152V6.1 (locus Pp1s 87_152V6) derived from phytozome v7.0 (chr-ID scaffold_87; pos 1119832 to 1120887)
cggatccagctcgccacaagccatttaaatttgtggtacgacccgtggggtcatctcacggatcttgttatcacttaccgtcacttgttgcctgatgcaaagacgagagtgaacttctagtgtagtaggtgattgcaagttgcaaaacgattcttgctaaactatttgatctcaaagggagcgtgcatatgatgagaagtcgaggcaagagtcggatgagatatgacgagggtttagggttcttttatggtgaagttttgagtattatagaaacagttctcgggttttaatctcagtgaataccaaatcaggaagtggaggttattggacccaaaaatcgctgatgttttggcatgtttattgggaacgtataaacttaaacagtgtggatggcgtgagaagtccatgatttactgacgccattcgtgcatcgacttttataatttttctctttggattaattttacactccactcgtattactcgaatcgttagtttgccatagtcctagatgataggtacatcctggctcccttagggcctagagagtcttattccaaagctctagtggttcaagccacaaacaacgagaagacagtggcacaagtcagattttacctcaaggactgcattcttttctttactttagcagaacaagagtgggatacaatagcaaaagttgctggatctgggatcctggcgtaatttattttgaacctcagaccacctctacgagaaagggtttgcaaggtttacttgtcacaaagttgctgggcacttgatcgggtgatcaattgaaaacatcgtgaatcctttctttcgatacatcatatactccaacaatcgcaaacctatgctgaaattatttttacactctgcagccctaaccttattcatgtctccagaatatttccattggaatttgtactctgacctctgtcttggatttcttactataataagcttccctgggtacattatattattttttatcatattttccgttgtgattctcttgcagaacaattcggtttcgacaacgaaatacaatatatt

SEQ ID NO: 116209 - DNA, 839 bp, Physcomitrella patens
  Intron number 2 from transcript Pp1s195_2V6.1 (locus Pp1s1 95_2V6) derived from phytozome v7.0 (chr-ID scaffold_195; pos 22022 to 22860)
agtgcgtcaccacataagcctcctcccaggtatcgtcacaactcttgttttccgaatctcacaaactttcctactcaaccaaaatacatagtgattcattaactcatacggcatttggaacggtttcgttgagaccctctctccggggggcatgtctagacatctatcgtgtaagtagcgttcttaaagggaccaattttggaatgcactatgctgagcttgttctcaacctgaggaagattttgaaaacagttgtcccctccgcgttgatagtttttgtggagcttcttttgaggctcagttaatcaaccttaaacaagttgtgtcttatccagcactgaatctgtacggggtggatttttgtgcacactcaaggcaagctagtaagtaaaatgcacagttaagaacatagttgaaattcgtacctaagaactgtcggatcaggtctgcctattgtagcttgggctttcgtctattattgaattctagacaatgatgcaggcagtatgtccctgtattgtggttttagcgtcagtaatcgacaacaaactcgtgtcttggctgcgtaaccattcatctgtggagattccagtggatactcttattcaagaagcactctctcaagttctaaagttttgacttatgctattcttgatgctcttcttactattattgcctaatttgacttgcattcacactcgggagacaacgagaccaattacatcttcatcagggactgcataaaacacaatttacaacggtttaatttgcaaattcgatgataagtacacttgatttgcgattatgaaattctttctttgtttttttgtggtgcagca

SEQ ID NO: 116210 - DNA, 710 bp, Physcomitrella patens
  Intron number 1 from transcript Pp1s21_393V6.1 (locus Pp1s 21_393V6) derived from phytozome v7.0 (chr-ID scaffold_21; pos 2343845 to 2344554)
attggtggcgccaatttcggctgtggatcttctaggtgcctgtcattcttatgccttcttcattttaaatgcttttttatttttattttttatgaatgtctgttttaagggtttttctttgcgcagagatttggcttacgactaattttccttcgctctttgctctcaattgtataatttgattgaatctgagggtcatggtgtacgcagcttctgtctttggtctgcggtgctgctcattcactatctgtagtgtacattgtcaaattcagaaggcttgtcaggggttttcagggtttatggagggttgaatcattagaacccgtgtcgttgtactgtcagcatgcacatgggaaagagatgttccagtcgtgcagtatatgctttgggctagtttttatcgaagaatgttttgtgtagtggttttttaacgtgagtagagtgacgtgtcctcgtaatccaatccacttagttggaaagttgatcatattgaacaaacattgaaatttcactttcattttcgtttctttttctgtttttctgtattttattttttatattgtgtgtgtgtgtacatgttcacttcttggtttttttcggctgagtaggatgatgaatatgcctactcttggaggttttctgatcgtgatagctccgtagttacgcattcctgaacatctggttatgtcctgtacaaatttgcagggagc

SEQ ID NO: 116211 - DNA, 664 bp, Physcomitrella patens
  Intron number 1 from transcript Pp1s74_77V6.1 (locus Pp1s7 4_77V6) derived from phytozome v7.0 (chr-ID scaffold_74; p os 442497 to 443160 reverse strand)
ccttttgggtacccaggtaagtaagcatggcaaggtactttggtcctacctgaattagtgattatcatctgtatatatatacatatattcatgtattcttgcttgggtgagggtttgactgtagtttctcctttgactccctggaatacttccacatgtaagcaatgaaatgtgaacccacccaagaaataaataactaaatggtgctacagtgcagtggtactcataagaaaacctagaagaagcttttgggaaagagcaccatctccattaattgattataccagttagcattgcacagaagcaattgcagaaactaccctgtcaatgcttgtttgttttattcattaaatgtagtcactgctatgtgttcgacaaaatgcagcagaattcagttctattccgaaattctgacacgacacacatgaagattctgttattactcatgcaagtgaagaatgaagagcagtctaggtagttctcagaaatgcacagtttcatggttagacttgaagacatccactgttgtcatgcaaaaaaacaggttccaaacacaagcctttaacccaatccaggaatcttcattcaaccccaattttttaaactcgctccgatttatcaattcatatggcagggtttgtccaagtgttccgctggcctcatt

SEQ ID NO: 116212 - DNA, 595 bp, Physcomitrella patens; identical to SEQ ID NO: 113945
  Intron number 1 from transcript Pp1s300_84V6.1 (locus Pp1s 300_84V6) derived from phytozome v7.0 (chr-ID scaffold_300 ; pos 518819 to 519413)

SEQ ID NO: 116213 - DNA, 792 bp, Physcomitrella patens
  Intron number 1 from transcript Pp1s145_170V6.1 (locus Pp1 s145_170V6) derived from phytozome v7.0 (chr-ID scaffold_1 45; pos 1073103 to 1073894)
ttctactctctagtggccaaatcttcttcaacaaggtgggtctaattctagttgtgtttatttcttttctttagggtttggtttttttgggttagtgggggagtggggttttgcagtccagcgctgtgacttggtcaattgtgctcaactctggggtggttttgtaagtggggacgttagtcgtgcgttgagttgtcgtgtgttgtagaagcggagctgttattgatcacatagtctgcttcagaagtgtttttggtaattcgcggcgatttttgttttgaatttttatgcgagtgatttgtatgctttgagtgtgctggaccttgagagaaatggactttcttgaattcgtgagctgaatgtcgtcagaataacgcgattttaggtctgttgtaatctcctctgttgtctgtgaattggggcatgcgtaggattgggtcacacctctaatttgacacacacatcttgcgcttctgcactgaaaggttaactagtggtgccaagatgcttccagtgatcactgagtgtacctgagaactttaaatccgcagggattttgttacgcatggtcaacaagagattatgaaggggattgctctgtcttaccattcggaattaatgcgtatttactttaagtgtggagggattgcactgatgcgcgtgaattacttgaattcatcactaattgccatttgctagaccatagggagcgaaccttgtatgtactttattttcataacattttgtgggattgtagtgggtgctgtcggacagcaaattcaatttccctta

SEQ ID NO: 116214 - DNA, 804 bp, Physcomitrella patens
  Intron number 1 from transcript Pp1s37_13V6.1 (locus Pp1s3 7_13V6) derived from phytozome v7.0 (chr-ID scaffold_37; p os 118669 to 119472)
agtggtggttgcagcggggttgggaattcgcaagggtgggaaggtccaggtggatgagtattttgggcagttcgtgggatctgagtcgagcattggagaagggagtttgatgtagtgttgatgtgccgtagttggattttttttggtgctcgttcgagttgtcgccttggtggggttagggtacaggaagaacgagtgtgtgtgtgtgtgtgtgtgtgtttgtgtttgtttgtggggtggtgtctttggatgcgggatgaggagattttgtttcagtttacggtgtttggaagcggatcgttttgggagattaagaagagtggtgtcgagagcatcgtaaagtttgggcgtgttccttggtcttcactgtgagtgcggcggaattgaagacgggcacttcggccgtgcttgatggcgtcttcggccatctttttattttcttgattcttcaatttttgttttttgaatttgtggattgttctcgcgaaggcgcgtggtctcgttgcttccttttgacttgcaaagttagactgttggtggaggattctactctgtgtggtaatacgtccttccaaggatcggtgggagcttttcgtacttcgtctcgcttattttttacttgttatatttctgtgtgtttttcttcgtggctcgattgattcagaggctggtgatcttggacagtttcttccttccatcttcttctgcatcttgtggctctaattagattttggggccttttaagttagactcattctgaattttgcagatccaaggtgattgcgtttaggtcgaactttcaaa

SEQ ID NO: 116215 - DNA, 393 bp, Physcomitrella patens
  Intron number 2 from transcript Pp1s113_13V6.1 (locus Pp1s 113_13V6) derived from phytozome v7.0 (chr-ID scaffold_113 ; pos 78141 to 78533)
gaaggaggtcgaggttgggggacgtcaactgtcagttctcactcgtcgtcgatgtgcgacattcaatgtagttttttatgcagtaaaaaaaaaaaaaaaaaaaaaaaaaagaagaagaagaagaagaagaagaaggaggagaagaagaagaaaggttgattgcgttcaatgtaacgaaatcagaagaaggcggagaggctccaatgatggattgaggaccacgacaccgacacgacacgacacggatatccttcagacagcacatttgattccgcgattaagtaaccgtaaccatcggatcataattgaacaagatgtcctctgattttcaattcgtttgattggtgtacatcaataggaagcagtcacatactttctatttttttaaaagaa

SEQ ID NO: 116216 - DNA, 569 bp, Physcomitrella patens
  Intron number 2 from transcript Pp1s21_76V6.1 (locus Pp1s2 1_76V6) derived from phytozome v7.0 (chr-ID scaffold_21; p os 421772 to 422340)
gccgtcggaaagccgggactcgtcgagtgtgtgaggtacctacacgcttttcatcccattgcggtttaaacatagaattacgttcctcgtgttaattaattttattattattattattgttattgcttgatgtggatggatttattgcactttaaccatggtattggtgttttgtaatagaagagaattgagccgcgcgattattttttgactagtagacgtcggttttcttggtcccgtaattggccgaaaccacaagtttttgagcttagaaatgcactagatctttgggaaaacttggaagaattgttatctcaaacgagttcttcgttgccatgaacaacatgactatttgtttggtcttcaagaatcctcaaagttaaaactattatttggtccctaccgcaattcttcgtgtgcccaagttgttatctcgaaacctagactgcatgttatcttatatcccatgtattgaattagaaatttttgtggagtcacatttttaaaccagaaaaaactcagttgaagctcgtcacgtctaagattttgcatgtgtttatctgcagtca

SEQ ID NO: 116217 - DNA, 606 bp, Physcomitrella patens
  Intron number 1 from transcript Pp1s37_63V6.1 (locus Pp1s3 7_63V6) derived from phytozome v7.0 (chr-ID scaffold_37; p os 334088 to 334693 reverse strand)
cgctgcagctgcgtagtgagtttcctagtttgtgggccaggtcatttggagaattcgtcctgagctgaattggtgtttgccttggacttaattctgtcgcattctcttcgtattttacctgggttgtttcatatagaggtatcgttcaatgtttaaggtagtgcttgaactctacagtctcatgggcgattccttagcccgggaagagttaaggaatcagggttgaagattccgtttttttgggtctatacacgttttgagcctcgaatgtgaattaggtttgagaatgtgcgcagagggttttcaatgtatgtagtgatgatacttgaaagctagtataaaactaatgttattctacacaatgggatgcattctgagttacttgggattatgtctgtcgttgaggtatcttcccctatcctgtattttgcgcaatattaatgttcgacgtgcatcagaattcatcaatatcgcatgcgtcggtgacttgttttcttcaccgattgatggacactgtttttagttcacctctttttctgagcaaaagtgaacgatcctaaagaatcaaagtttaattccgtctccgcaggcgcatcttttgacgtg

SEQ ID NO: 116218 - DNA, 800 bp, Physcomitrella patens
  Intron number 1 from transcript Pp1s5_325V6.6 (locus Pp1s5 _325V6) derived from phytozome v7.0 (chr-ID scaffold_5; po s 2260560 to 2261359 reverse strand)
ttttacttttgtgggggcggtcatcgttatcatcggtgagtagatgcttgtgtaggactaaatttggtgaggtgtgtgctattctggcttgtttaatgttgagatcgtttctctggagtttgtgggttgcagatgtttgcctccgcaggtttgtatttcttgattgggtgtgtgttagttgctagtccgttgaagattgtgtcgattcgttgtgtgtcgtcatcttttaattgcctcttgatattctcaataaggaatttctcccaggaacctcggtggctgattatatgctggggtcgttctcaatcgcttctatcttcgggttggagataaactgatcagttcctcgagatatgctctaaaagtactctacagctagtcatgttcagccgcgtcctatccaattgctttaatttctatgccctgtcatcgctcttcaacatcgatgtttctttgaacttttcccatgccctttccttaaggatctgttcgttaaagctgtattcttgtcctaaactgtaatctttggagaagctaaattgtgacattgtaagtcttggactgcttatcttttacgcatcggtagagcatctctttacgactgctcttggtggtctgtgtaattggttgatgtgtctcatatttgctgcctagacttgttagtgcaactgttaattatagttttttaaggtaatcttcaacgatgcttgagtactacagtgtaatacctttatttgaatcattttcagccgttttcatgtgcagcagagagcattagaatcaaggagttgaaagcatcc

SEQ ID NO: 116219 - DNA, 1000 bp, Physcomitrella patens
  Intron number 1 from transcript Pp1s67_247V6.1 (locus Pp1s 67_247V6) derived from phytozome v7.0 (chr-ID scaffold_67; pos 1697711 to 1698710)
tttcgcctcataatagcgtgatccttttactgcaggtgagaacttatctctttattcaaactcctgcggatttgattgtgcttactctcgtaataagggttttgattttctgtgtcttaacaagttttgacgtatttctccgcatctctgttccaagagcttaagaaactgagaatttttctggtgttgtcatgcaaatttccttttagaatggattccttgggagacactgtgactaaaataaaaaccaatccaatccttccaattgtgataacactaggaatttattcgagcgtattatgaatatcactgatagtaagtaggtgtctcttctcgttgctactctggtcgtctctatgcgcgcgtttttgaaacctgaaggtagtccaaaatcactagaatcagttacagtggttgtctcagcagcggtctgactaatttgattcacgtgcactcactacactgttgaatctacttacataaacattggcaatttcatcataattcgtaaacttcgtcaaaatttctgccgatacagattctagggcaaattggtgtacacgtgcatagaaagatttattggggatttgagtgtcccaaaatgagatgatctttgtgcggatgggcttttgttttcttttgaacttagtctgatattacgatctgagggctgctcgatgctatcaaactggatatctttgcactgtcgggatctgttcgcaagagttatcgagaatgttgtaacgaggtggttcaattcaatcatcttcaatggctgctctttgcctgtccgctatctagacaccagaagatggagtgttttttttgtttttttgttttttgtttttttttttttgaaaattacctcgtagaagaggtttggggggttgtatggcaatagtggttccatgccaggatatcttaatgagactgaatattaataactctgttttaatcgactgtaggaactgtttaggaactacaagcagtggctcggagg

SEQ ID NO: 116220 - DNA, 890 bp, Physcomitrella patens
  Intron number 1 from transcript Pp1s145_92V6.1 (locus Pp1s 145_92V6) derived from phytozome v7.0 (chr-ID scaffold_145 ; pos 559822 to 560711)
ggacttcgtagctgcagcgtttcggaatttcgagggtacgtctcacaaccctgccggtgaaactttcttttaagaaggaatcgttgggggaaagatttgcacgtggtgtttgtgcatgtgcatttactgaggaaatttgtggcgacggagactggagtcgaggtgaagggcggaatgttttcgaatgttagggtgggattactcttccgaggagtattgaatcaatgcattgtgtgttggtgttttgatttgggcggttcactcgattagggacggctgtttttatttttttgtttttactccctccctgcagggctgccttgcgaaaacgggcagcttgtccgcttctttcaattttgttttactttaatattattttcatttttttttttgaagtaaatgtttattgttaggctgtagtatgagcttcttttggtgccagcagagggtagagtatcgcgatttatgacaaatttctgcttccggggatttcaattttatgtactggctcgttgctggtcgctgaaacttttggaggggatttgacaacgttgagaatacaactctgacctaattttttcaatgttagcattcaaggtcagctcttcttggtagtctgcattccgccaagttatgtgttagaaatgacatggaagacacttaagtctggtcaaagttcagaataaccgtgagagaaaactttttacattagctagttttgagtactgatacgagacttgcatctcactgtatacggatacactcggacttgctcctgtattgacatttcatgattccagtatgagcagagtctcaaacagttaggtttagtatctgtgtttcaagtgctgacatttgccctatatttagagttgcgtttttacagtggc

SEQ ID NO: 116221 - DNA, 690 bp, Physcomitrella patens
  Intron number 1 from transcript Pp1s33_43V6.1 (locus Pp1s3 3_43V6) derived from phytozome v7.0 (chr-ID scaffold_33; p os 279839 to 280528 reverse strand)
ccatcggaccgactgcgagaagacgtattcagcgtgcgcacaatcgaatcgtggtttcatgcgaatcacgtccttcattgcccacatcaccctcaattcccacgcccccgttactaatcttcttctgtttttttaatgagaaatgtgtcgtgtgaaaacgcttggaatcgaaagcagattttgaaatgccgtgtgagaggaggtgggtctgatgcattgtggaatctaattagcaccatttttgaaagagtggggtttttttttttttttcatcttgggtttgccgaaaccctaacctcacgtttcgatcgcattgggtcatgtccccgatctcctaaatctctcggagctgggaatctgccgagcttgctgtatcttacttccaaggttcgagtcttcctctgctgaagttcgtttcctgaattttatgtcttacgttctaccgccatgtttgtgtccgccaagcttaggttgactgtggttgattttgaagagcgcgcaatttgattaatgtattggctgttgttagtggagtttttaaagtagtgtcggatcattgggaatgtaattggcttgtgatgaacatgaatccaacaaactattgggcattgcatcgatgacttcatacattgagatttgacgtcgacatgtccaggccaaaagaaggtataaggtcatttacgctcctat

SEQ ID NO: 116222 - DNA, 784 bp, Physcomitrella patens
  Intron number 1 from transcript Pp1s224_133V6.1 (locus Pp1 s224_133V6) derived from phytozome v7.0 (chr-ID scaffold_2 24; pos 724766 to 725549 reverse strand)
ctgtattaatccccgcttcacggatccattacacggtgataaatctcatgggttctctttcttttgccttatttttttttatttattaattttgttgttgtttctttttctgcgtagatcgatatttgataaaaatgttacttgaaactcgtcgctaagctccgttttgaaagcacgtcagcggattgaacctcaaggtatcgaatcagcagttccactagttacggttacaatttcgactcttgctcaatcctccgcgactgagtgaaatcctgtccagggccaggatcaggatttggatttccttttttggttcccgtatttatttagaattctttcgatgcttcgaacattgccataccacgtgtttaggttattccataagtgactcaaacatggcatttcagaaggaaaaaataaataaaaatcctgcatactatttgacctgcttgggtttgctgctgcctcacacatggatgcattcctggagcagatttccacctttgttgccacttgggcgtggatcccagtcctagcgtcaagtccgggaagttctgcagaatgagaataaactatcaaagcaaaaaagaaaaatagaaaaatagtacaagaagaagaagaagacttttaccccacaaccgaagcaatcgttgaatcgctgttagatgcgagggtgacaataaagcgccgctaacggattcaaaatgctataccaccatgacgtattcctaggtcttgtcatgctcgaggttaaagaagaaaactggttctcgtggaggagtaa

SEQ ID NO: 116223 - DNA, 761 bp, Physcomitrella patens
  Intron number 1 from transcript Pp1s64_22V6.1 (locus Pp1s6 4_22V6) derived from phytozome v7.0 (chr-ID scaffold_64; p os 278873 to 279633 reverse strand)
ttgggagccaggagtcgacttccttcactgtgctggtatgtgtgtcgatcaatgccgtctctttttgtcaccagcttgactgattggaagttccgattctgcttcatttcctccattttcacatttcgggagtgagtatgtatgggcggggtgatgagcagtaaggcagtgtgaaaaactggtggcagattttcgttgtttgatgttgttgtcttgagtccggaaggttaaattgagcacgcgggggtgaggccaagaacatagattagtcgtaattgcattccactgtaacaatgtgcgattttattcaaagagaactttggttttgatttctttgttttgttttgttttgttttgtttgtttgtttgtttgtttgtttgtttgttttttttttgttttgttttgttttgttttgtttttttttttttttttccagtgtggaggaatgattcaggtcttcctgagcatggtgagtctaagtcttcattttcagcacaatgcagtcatcgatggcatgtaatgaacattggatgtggttccctaacagcaatggcagttgattgccaagtcactcagtgcggctttaaggtcatctttggtgaccacgtagaaatggaatgtgcgaaggtcatacgcgattatacctcaatttttgttactctgtagtattttcagactaccgttccctaattttcgagcactaaatatgcaacatggggaagcaggagaagggagaaatctactttttcttcaaacccaa

SEQ ID NO: 116224 - DNA, 458 bp, Physcomitrella patens
  Intron number 1 from transcript Pp1s246_24V6.1 (locus Pp1s 246_24V6) derived from phytozome v7.0 (chr-ID scaffold_246 ; pos 145974 to 146431 reverse strand)
tggctaagtgagtgttttcttaccctggcactccgcattgatttgtgctacacgtttgttgatggattctcttaatgcaaccaacttatccgaatacttgtttctagtttactggtcgacttcaaaccttcaagctagggacgcatatagtagagacgcgcagacttaaatgtaatcgtagatgtctcctcatttatgtgataaataacatacaagatcttctatttctcgtctcattgagataatcgcactttgaaccctggttcatacctcatcgatctcagtttactccctacattatgggagtcttacattcaacagatcatggtactttccatgttgaagtagtcagagaaccttctattttatcggctttccgtataaccttcaaatagcgaattgcaggattattgaaaagaagtcagaattcaaatgtgttcctgtgattcttttgcagg

SEQ ID NO: 116225 - DNA, 588 bp, Physcomitrella patens
  Intron number 1 from transcript Pp1s18_262V6.1 (locus Pp1s 18_262V6) derived from phytozome v7.0 (chr-ID scaffold_18; pos 1964825 to 1965412 reverse strand)
cggagaacctttgacttccaccgtagctttataaggtccgtattgtggtggctagtttaattctttcagcatgaaaaacttctgggtgtgctgaaaacacaaattgaatatctgaggagataaaatattgaaatataataacactgcgtttttgtttgcaattgtttgatgacagagttgctggaagcaagcggtataatattagtgacaggcaactgcaaggaatttgtgctcagagattgctagaccctttctttcaaacgatatcaaacaacacacacttccttcgggcattttttggttccgtggatggtaccttgaggatttttccaggatcagtaatacgcttaaaaccaattcttttctagtaatattcacaaagcccagagcactgatgaaagcatttgttcatttactctctttttctttttctttttcaaatttaactttttggtgtgtatatccagaaagttcatggtccttctgtttgcatttttcgcagaagtgagcaacatttacagtaaccattctcctatgctgtgtacgtcataactagaaaataaaatggttttttttgtcgtgtgcagg

SEQ ID NO: 116226 - DNA, 508 bp, Physcomitrella patens
  Intron number 3 from transcript Pp1s36_334V6.1 (locus Pp1s 36_334V6) derived from phytozome v7.0 (chr-ID scaffold_36; pos 2183279 to 2183786 reverse strand)
gagaaagacaagcgatttgcggctgtaacatccacgtatggttttcctctagtacttagcatcgcatgttggacaaagtgatgttgcaattccataatctgtttccttatgaaagctcgcatttttcttttcaacatgcttttgagcttctgtaaaggttactgctttaactgaaggtcattaagaaccatgccttgatttgcttgattagaatggtgttaaaactagtgaagtactgggacctctttctggtatgtttgctggttgttcacatcatttatttactatattattattattattattattattattattattttgtagttaattattcttggaagacaatccttccacattgtagggttagcggtatccgtttgctgttcgtttttgtttcaacctaattgcactttttttctcacttcagatgatctttgaatcttttttgcccgctcacaaaagtatcattgcagaggctgggaagggacggctgcaagtccaagca

SEQ ID NO: 116227 - DNA, 617 bp, Physcomitrella patens
  Intron number 1 from transcript Pp1s187_23V6.1 (locus Pp1s 187_23V6) derived from phytozome v7.0 (chr-ID scaffold_187 ; pos 110691 to 111307 reverse strand)
ctctgtcctctctgactgagtgtgcggagcttgtggtggggtgtgatatcgtttttttcggattttctcttttgcttagtttagtttttttgttttgttttgttttatttttctcaaaaaggatttaaagctattgtcgtgattctaaagcatttaagagaacgattccccatgtgtgaggcgctgagcttgtgtgcagtgaggttttagggtcgtttctgtgtttcgcgtgtctgaagaagttgttgtttctgcgttttgggaggattagcgaacatttgtagactcagaatgtgtgttatgtttcaactgcgttctcctggttaaaagtcgacgaatccaatgaggagctgctgaaaacgcttattgaaatattaggtttgtgaatcttttggagtgctgtgcggatagaacttttagaggctttagtaatcataaaagaatgttgtggagtgcgtgttggcgataaacctcgttgccataagtggcgttccatgatgttcgagtattgtgggagacgatgttattcatgtgttaggattgttgctcaattctgaaaatgtccgaattcgttttgcaacgaaaccgttgatagttacgcagaacacctgcaaaga

SEQ ID NO: 116228 - DNA, 998 bp, Physcomitrella patens
  Intron number 1 from transcript Pp1s59_4V6.1 (locus Pp1s59 _4V6) derived from phytozome v7.0 (chr-ID scaffold_59; pos 11799 to 12796)
tacctcaggtgggtttggtagattattaatcgaagaggattcggttctcgggtcctagcttgtgctatgtgttcgaattgtggcgtttttgtttttgtttttgttttttttgttttttttcctctctagcatcgcggttagtttgtgtgtaggtggtcatttcgcattgagttttggcagtttttgtgcttggaatcgttaggctgcttttggatgttgttctgaggataagtattcattacttgaagtgtgaggagttttggcagacatgctctctagggtgtttatttacgcatgccttacatgagttttttttgattccgagctttgcaaatgttcttggtttcttgtcccatttcacgttctaagtttgctcttactgcatacgattttggagaataattcagcggaatgtgttagtagtttaaaaagttgacgtgcttcagtctcagaattaatgcacatctgacttaatgctgcgcatttcaatgcaatttagtgtgattcaatccaatgtggctagtattatgcgcataaatctgtgtggaagtaggtttctatatatcgtaagaaaacaccgcatgtctttagctcctcgttcatttttgattggggaagtcaaattactttgttgtgacagatcctgatgcgttggtaatagactctagatcttattacttttgcaccttgataaggtgttctttgtgacgcgcagtatttggttgcaatggggtttgtctccgtaggtcagaactgtgtaatacttttgaatatcaagaaggcatgcagtagcctagttatccatatgagagtacagcttttatctacatattttttgaaacggaggatatttttcagaattcaacatccaatcacttgcatgatttttggactggttggaatataatatgaatttccgcccttatttgtgctcaacattcctgccaaaagttgtgttaatttacgttctggatgactgagcagttggtggtgcatcg

SEQ ID NO: 116229 - DNA, 880 bp, Physcomitrella patens
  Intron number 1 from transcript Pp1s65_59V6.1 (locus Pp1s6 5_59V6) derived from phytozome v7.0 (chr-ID scaffold_65; p os 277354 to 278233)
gttacgaaaatcctcaaattctcgctagcgaaactgcttgtgagcctgccctcccctttatcctctcatttcgtcgcgacagttgtatggaatatggagtgctaccaatcctcggggatcccgtcagttgacgtaggggataagtttttgctgaattctgcacaaagatctattgggactggacagaatggtatccctagaatactcaacccatcgcccgaatgtgaagtcaagcatgatgataaccaggaataatcgttgtttaaattggaaggctactactgttggaataatacaatggtatgtgtgtgtgtgtgtgagacagttaatgtgagcgaagtagaggcgttgtaagaactcttcaagaaaataagcagttcagtcactgacgacggtcttattcacaagtttttagttccgaaactcctcttccaaacccacgctctacttggctttgatttgatggttgtatccctctgtcgcaatcctcgtcgtcgagattggacaaccgcaacatgaagccactggaacagaattaggaattcagaaactttgatgctcattcagtgaactgcttctaaaggaaaatatattatgatcaagagtgtgggtaagtcatgttcgtaccttggaactgtggatgcagctgcatgacccaccattactcagtatagcagtctcctttaccacaattaatgtgccattagaggttgcaaatcttttgcaggtttcgtgcagccacgagtatcgaaattgtcacatgttttgcttattcgttctttagtgaagagacctaattgggatactatttggattgaaccaatcggttggattgtgttttgacttcttgtcttggtcttcctgattttgatcaggcaga

SEQ ID NO: 116230 - DNA, 392 bp, Physcomitrella patens
  Intron number 2 from transcript Pp1s65_59V6.1 (locus Pp1s6 5_59V6) derived from phytozome v7.0 (chr-ID scaffold_65; p os 278254 to 278645)
aaaaccgcaagaaagagaatctttttgctgacagggtaatcatctagtcttttgtatttggtgctctgatgcagatggtattgatctggcctaaagcaagttcattgttcggattttctgtaatacactaggttatgttggaaggatcaaattaccaagtgcaaacttcgaatgcactacaagaaactttcgctttagatcgtcacttcgaagctctaagtcctatttcatccttttggttccgactaatttcgatgcgtagtttatttagaagacgaattagtagttatacttgttcgatcctgtcttatttttagccttaactgtgtttttttggttgcatctcttaaatgtcaggtttttgatttgttcgacttgaagcaaaacggagt

SEQ ID NO: 116231 - DNA, 790 bp, Physcomitrella patens
  Intron number 1 from transcript Pp1s233_110V6.1 (locus Pp1 s233_110V6) derived from phytozome v7.0 (chr-ID scaffold_2 33; pos 703847 to 704636)
ggagaaactgggcgagttttttgattgacgtggaggtacggtgtggctaatgacgtcgatgatgcatgctgattgatcatcagagaaactaattcccgttagctgactggcgtgagcttagatgcagatttttataatttgtacatgtatatttttaattgtttttttaaaaaagaagtttatgtgatgtgggcaagatgaaatttgccctaggtcgagattgcacgtaaattttcctgtcatgttgttgtttcttggcgatttgcgttggtcatggattactcagctaaggggatttttaacataggcccatgctggcgacagcgtacggagatattgtgtagtcagctacgcctgggtaaaggtgaacattgggatgtcgcgtaccgtgtgttattctttgttctagagattgtagggacgatgagtggcttcgaatagcgacgttgccatctgcgcactctctgtgggttcttttttcattaagtgcatgagccacagctgatactcttcttggttatcgtcggttggtggagaatcgatcacttttgagggccgatgaaattgcataacgtgttggcgtgtgatggatacaccgtggtggatatggcgatgacgatagttagtctagtacggttttttttcgaggatgtaatattccctcacgtgtcgaagctttcaattttgattctcacgtctgcttgtatgcatcctggtcgactaatcgcatgtgggctgatatattgtccatgcagtgagacgattcaaattccggaaagggtgacgttgg

SEQ ID NO: 116232 - DNA, 731 bp, Physcomitrella patens
  Intron number 1 from transcript Pp1s158_27V6.4 (locus Pp1s 158_27V6) derived from phytozome v7.0 (chr-ID scaffold_158 ; pos 221382 to 222112)
aacgctcctcacgtgagacgaacacaacctctaccgtgtccgaatttttggtgttctcttggtgccgtggaatagtttcttgcgctgcattgagtaggagtgtttttgtttttgttttttttgtttgcttccttggaatggaacttgttttttgtgctcgcgcgttgatgtggatttggaattttgtgttagatcagctcttgtgcgggtaatgctgagttttggtagttcgatgtttttgctcgcatggttggtgacgtatgtaggaaattgtggtggagggaatattcgggggagtttgcgtataggttgcacggtagcttgatgacctatcgtccaggaacggtcttttgcttgagctttagtggtagtagtagtgggggagtagaaatgtcgattctgttaccatgctctgtttttgtgatgttttgttttgtttttgtttttgcgatttattttgcgatacgtaaaatggcgcctgctttgtttgtttagtaggtagctaggattttgatgggaaatttctgcaggcactggcgtgaaagtttcggcttagaataattggtgaatttgacatacaaggcctttgcaagttcgctaggaaggcgcaggcagagtgggcgatgcttgaaagccgaagaaactgcagtcttgttggaactgttttttcacgtttgtgcatgtgggcgtgtgcagcagcagggaatcgtagctttggacggcagaatttg

SEQ ID NO: 116233 - DNA, 938 bp, Physcomitrella patens
  Intron number 1 from transcript Pp1s2_64V6.1 (locus Pp1s2_ 64V6) derived from phytozome v7.0 (chr-ID scaffold_2; pos 389527 to 390464 reverse strand)
ctcgtgtcaaagctttcgaacggtggtttgaggtgagtgtgtattagggaagtgcattcggtggtgcctggaatacatgcaaatggacaaactgagctttgaattccaaatggtggaattcaaactttttgaatgacctggagaatgaatgcacaatcgcttgatcctaactccattctgcggaagtttcaggatgctgtaattgctcttccctcaaactgccaaaaacttagcggccgtgctgtaagcagatcgggccaattctgtaagaatgcaggggtgataatgctcacaactcatcataactggctgctcataggatgcgtttacgtaacttgaacttcctcatcctccacgaattagcctgatgtaccacatgtctttggaacggttacagtgtcgagaacgaatcacccggaatttgcaagaatctaaacactctcgtgcaatactcatctcacatgtgtagcaatgtaacttgggttctaattacatcgtattttgtatgagctcttcccatctcaattttgcaaatcacctgcacaatatcacatcacttctatgatagagtcatgttcttggacaaaagcagaatttcaatagttttatttagcaaccgatattaatagcatgaatgatattgtttactgcctcatcgaggtcaatatccatttcaagtctcaactagcaacttttaacttcgagaaccatgcagtagatcagtcgtaggacatgcgtctcatttttcccatttcttattcatcaaccaaaagtccactgaggcgaaagcatctaatggatgctacgttattacaatcacttctatgatatgatgtaatgcttggtcctccgtatgtgttgactgtgcatggtgatgacaatcgtggtttgcgagtggaacagtgatcgaagaagccaccggggacttttatcggcac

SEQ ID NO: 116234 - DNA, 881 bp, Physcomitrella patens
  Intron number 1 from transcript Pp1s44_311V6.1 (locus Pp1s 44_311V6) derived from phytozome v7.0 (chr-ID scaffold_44; pos 1913202 to 1914082)
ctgttgtcagaggcggagtccagaaagtggacttggtatgtagagttcgtttctctgcgcttcatcgcttggagctgcgagagagcttgttgcttgattcgtttttttacttgttgttcaagagtgttttttcttattttgtttgatggatagttttcatgcgatcgcattttactgcgtcgacttagagctactacctggaagacagcaatagttgaacgagctaaacatttaccggtgtgcgaagaaatcgagtggattgttcgacagataaataattcgagtgtttcattgtgatgattgaaggggacgacatatccttgattacctcaaatcgagagatgttacgcaatggatctagagtgaaatggttgagtaggttgtgaaaggtgaacggatctggccagaatctccaaaagagagcacagttatgcatgttttcgttctgtcgtatgttttccatcacttgcacaaattctctttgacctagtatgggaaaagcaaagaatgccgacatgttttcctgactagtttatttatgtgtatgtgtagtgattactcctctcctccattctttttgtaaaaatctgtttaattttttaatccttttttatctccgcattttttgccctacatttcgttgggagaggcgcagtagcaggactcttttgtatcagtcctcttaagctcttacgtacatgtcgtcgagttccaatgaagttgcgctattttgattaatcgtgatgatcgaatcagacggatcagtcatgtttgccagctcaacctcccagagctggatttgaatgtaatggctgaaaaaataaaacatattggtgtattttgcagtattagagtgtgcgcattgaacggtacttggcgag

SEQ ID NO: 116235 - DNA, 596 bp, Physcomitrella patens
  Intron number 1 from transcript Pp1s132_95V6.2 (locus Pp1s 132_95V6) derived from phytozome v7.0 (chr-ID scaffold_132 ; pos 752319 to 752914)
gtggatccttggagtgcaccacaatcttcttacctgtaagtgcgtttatttgtacttacatttagaactctgaatttgtgtttcattagttgagtgagagggacttgatcagtaagccgaggagctgtggcgacaaattcttgaagaatttttgatgttgtctaagtgagaaggagtattgtggaaacacatacacgcacacacacacccttttgtacatatacatacttatacgttttaaatttctgtcaattgagttgatctgtgacggtattatactgctgaagaagaggtagtgttatgtatttttttttgtcgtgtttaaatggactgtgttaccatggttgtttgccctgcatgctggttgtggcgtctacagtgtcaaagagccttgtggtcttgaattccgatgttccggaatttcaaggggtcttgacggtgctgcggggtctttcactgaagtacagtcagcaagcgatcgacgtggggtcatacgcacttaccgtatcgtcctttttttattttaataatttactttactgtttgaagaactttttttcggatctgtaggcatttaaaggcagcattgagaggcg

SEQ ID NO: 116236 - DNA, 1021 bp, Physcomitrella patens
  Intron number 1 from transcript Pp1s45_76V6.2 (locus Pp1s4 5_76V6) derived from phytozome v7.0 (chr-ID scaffold_45; p os 506005 to 507025 reverse strand)
gcggatccggggcacagaggtatcgccaattcggtcccttccttgatgtctgtttagtgaaagtatggtgcaatactgtgatgaggatatgaattgtgaaaaatattgtgggtgcattcgatttgtgaggtagttagtgaggctcaggggattcgagggggaatttaggtgccaaattcttgtctcggagtggattccatgttgcggaatcgaagattgattacgtcgtggttggtcctgcgggtgcgcattgtgggtttgcgaagttcgtggacgcatttgttgttttgaggttgcgacgtagaattcgtggtaggagattgttgtgtgctgttttcgtttctggggattagctcgggagctttttaggaaacttgggagctgtgtaaagggcagggtgctggtggtccttaattagaagttctctgcttgaggtgtaatcttcgagtccagagatggcgtctagttcccctcgagttaattgtttcattggttttctggtatttacaaatttaagtcttgcatttgttagcatcacatttcctttagcctttcttcttgggtttctaaataaaaaataaaaaataaaatatcacctagaattcctcctcgtcgaatatcctttttacttagtgtcatgtttctcgtgtaacagactggcaagcctgttcgaaacgtttgggattggggagagatgcataaatggaatgaaattggatagcatcggtcatggacattgccgggatgccgggtcattgtcatgttttcaatgatatagatctcgaaattggacagtgagaagctgtcgagggtttgtcacggtatatgtttgatcgtagcttgtagtgagagactaaagaaattaagacttgataagtaaatttaagtctacgttcatcctttattggatagaataatctgtctttagggctaatatagaaattgtagaactaatatctcactgatagaatgtgattgacttgcagagcggtcccttggttctgtggctgttgtgggagct

SEQ ID NO: 116237 - DNA, 633 bp, Physcomitrella patens
  Intron number 1 from transcript Pp1s149_228V6.1 (locus Pp1 s149_228V6) derived from phytozome v7.0 (chr-ID scaffold_1 49; pos 771296 to 771928 reverse strand)
agtcaccctttattatcagcaaaaggacttttgtttgtcctttttctcatttggatagtttgattttgtgaaagtgaaaatggattcattttttgatagccaaggatacatacatggtaacatagactgtataacaagtagctattggcttgattcatgcattgcagaaatctttgatggagttgaaaggcgtccctgctcacacaagcttaatgttgtttccaagagagcttcaggcggcaagacttgaacgttgcaatgactatcagccgtggagaatcggttgcagaagaaacccatcactgatctccacaagcgtgatgctcactttcagcaaaaagctttcgtaggctgggctagatgttgtttagactatatgacccaccctctggatcttttcccatgtacgaaagcttactgacctcactttccactcgatgaaagatacaagctctcggtatgagagaaagcgatcggtccccacaaactgaggtgtcaagagggaaatgctgggcccaaagctgggttgatgagtgggtgtggaagttgattgatgaattgctcacgaatatcctgaattaaacgtctgtgaaaatgaaccaggtgaactgttgttcgggtttgcggaagaga

SEQ ID NO: 116238 - DNA, 468 bp, Physcomitrella patens
  Intron number 1 from transcript Pp1s25_204V6.1 (locus Pp1s 25_204V6) derived from phytozome v7.0 (chr-ID scaffold_25; pos 1332580 to 1333047)
tgcagggaggtttggtggtctcctctgctgcgcaggtacattttttgaagctttgagtgtgggtttgagtggattgtgtgctggattcttcgcaatgggtgttggttgtcaccttgaatttttttggttcctgataatttcgaatgcttttggagtttctgcgattctttcactgctgggtgaataatgtagtctattgttgtggcagttgttttttctgtgtgggtttatgctggttcggctctagctcatggtggagatttttgaagtctttcagtttgtgttgacgtttatccttcttgaactgtcggattggtgttggtcgctggagaatgtcgagttcgtgtgcaagtgtgagaagctgttggtgtttcataattttagaagagcgctgtgttaagaattctcacgattgaatttgtgcatctcacagacgcaagtgcaatctaccgctagccgattcgctct

SEQ ID NO: 116239 - DNA, 966 bp, Physcomitrella patens
  Intron number 1 from transcript Pp1s92_76V6.1 (locus Pp1s9 2_76V6) derived from phytozome v7.0 (chr-ID scaffold_92; p os 929443 to 930408 reverse strand)
ttttgcgcaaaattttgatctacggcgttgtgaaggtgggtctaggttattttcttgattgtaagggttgaaattcttcaggttatgcaaggcatgcttctttacgcttgtttgagatctggatttttggagtggcgtttcagcaacagcatgatttatactgcttgtgtgtgttagtacagtgccgggatgaagtttgaccgattttattataatgagcgatttacgagggcatttagacggacaagtgatgtttaaaacatttttctaagtgttttgcgtgtattttaccgagatatcttagtggttaacagtaatgggagcagtgagatgagttctggtattgtaattttctgcagtttttggaaatactttcctcgggaactgctcttttagattcaattggaacatagagtacaggaaggctgtggtaaattgttgcaagtttctatgcagtgtggaaattctttggtggtactaatcgtgtgcacaataggatgtataggcctatttctctctttgtacgtgcagcagaagattattggtagtaaaaatggtgtagtttccctctgtgtgctctttcaagcttgcgaatatctttcagcggttgcatctttacagtaaatagtgctgggttctctcctccatagttagggcggaccgtataagtgatgctatcactcaggattagaaagatctgatgccagttgagactagcagtagcttgccaagttagctaccaacttttaacgatttgttctttttcgtttctcaaagaacaatatgtcttggtattccttgtgcagtgtttagttacgggatgctgtaaaacgactagtgcacaatatgcacagatactaaggcaaatgtttgggcataatatgatctgcgtttgtaacatgagatccagtttataacgaatatttcatttgtggtttcaggtagttgacttggagatacgcagag

SEQ ID NO: 116240 - DNA, 381 bp, Physcomitrella patens
  Intron number 1 from transcript Pp1s326_24V6.1 (locus Pp1s 326_24V6) derived from phytozome v7.0 (chr-ID scaffold_326 ; pos 138283 to 138663 reverse strand)
ccgcaacgtcctcatccttgagcccctttcttcaggtacaattagatgacgcatgctcttctgtgctgattttgtcgcaccgtaatcgcacatttttctgcttttaattgggaaatgtattcgaaaattaactcatcatttactggtgaattgatgaatgtgaagtgcgtattggcaccacaacatattctggagaagtcttcctttgttttgtttggtttggtttggtttggtttttcgtataaaacagaaacattatacgatcattttccctctatgacagatattcacttcataagttaaggttatcgctttgagatgtgtataacattctgtgatgattgtactgcttttgtcagaattcacagacttccacaatca

SEQ ID NO: 116241 - DNA, 673 bp, Physcomitrella patens
  Intron number 1 from transcript Pp1s117_187V6.1 (locus Pp1 s117_187V6) derived from phytozome v7.0 (chr-ID scaffold_1 17; pos 1143043 to 1143715 reverse strand)
gcgatcctgctgcgtcgcctgcagttgagcgcgtggtcagtcttcctcctgctcctctttattctcattctagggttgcgccactacaccgtctttctcatatttgaagcgtgtgaatggccccactccgtcactctcagaccaatcgttccaggtttagggttctatcaccagctacagaatttcagggttcggatgccaaaacaattctcaaatcattgcatatgtagtttttttaacgcaatgcccaaaccatttgaaagccctcgtggaggatatccatatcacgatctgaccccttctgtggcatccactatatcaaagctgcagtggcgactttatggcttcggtgtcaatgaatgcaaattagatcatgctctgcggctttggaatttttccaattgtcgtatgttttctagctttctcaccaacctcctcgccaggtcgttagatattcccgaaggtggtgtgtctaggatagttctctgtaggcgatctgctacatctctgtactaatcggtgtagtttttacgagaaggtgcgcgtgtgcattgtatcatgttgttgaaagtggttgataactcttgatgatgtagggaccagtatttcgtcgggaacgattgttctcggtaagtctgatgaatgctagaatatgttggtaatctgattcaga

SEQ ID NO: 116242 - DNA, 688 bp, Physcomitrella patens
  Intron number 1 from transcript Pp1s25_330V6.1 (locus Pp1s 25_330V6) derived from phytozome v7.0 (chr-ID scaffold_25; pos 2335725 to 2336412)
gttcctctacgccccatttcccggcaccgttgtgggtatgggttttatttttatttttatttttcttcattttttttgtcgcctgttgctcgtgttggtcaatgctacagcgttgagtgagtttcaattcccggggggtgtgtgggttgcagtgttgaatatgtttttttattttttttggagcatttcatgttgcgttgcatcttggctgcgtcactgcagcacgtttgaattgcgataggggtgaatcgttaactggtgagggggcgatggtttgtgtttgttacagtcgtgagcaggtttttggaatatgctttgtaatgcggagagtaggatgagtttggaaggaaagtcttgaattagggggtggagattgaatctctgaagagtttccgaatcttgagcggagttgacgaacattcaggattaaagcgaatgtagggtttttgttttaggaatgtttagctcttgttcgactcttgaggtctgatcgagattgcgcgttagtgtatggttgttggttatttactctctctgccaatctggcaaattgaatttagtgttgttgttgttgttgttgggtgcgacgccctgtggcggttgagtggagattggagtaaataatctgcggtgtcttcccgtttatgtctgtttcagcatttgcgaactgaatcttaagcgggggcgt

SEQ ID NO: 116243 - DNA, 815 bp, Physcomitrella patens
  Intron number 1 from transcript Pp1s68_89V6.1 (locus Pp1s6 8_89V6) derived from phytozome v7.0 (chr-ID scaffold_68; p os 357667 to 358481)
gtcgtcgttggagaattgtaaaacaacttccgcttgtaagtttcgggatctttcccttttggtttgttcggctcttggaaacattgcccgctaatcgtcagctggtgaacttgaaaagtttgccctcggctttgtgtggatgccaaaaagatgttcgtcctttccgcattcttccctgcgtccacgtgatgtgtagagtgttggacagaaatcgcgtgtgttgattctacaattttaaaatgctttttagttttaaattctattgaattggtgactgccgaattgaggttacacgtgcaatccttttttgtagtgaggtattcaaatctagtgtgcctcaagccgtactcattttgtttcacaagatttcggagacgtgatctaggaactattatctattgctcagcgtacaattttttattttcctgcagaaatgctaatggcattcgttgtttgtgaataaatacgtcgttccgcttatcaatttatgaccaaatggacttttctctctttgaactgagtattacaataatgctctatacttaaccggtatttctgagtttgcaaatgcgattacttcaagcatcgctaaggcgagacactaatttcgtacaagcttggaggtccggaaccgtgtttatatgtcactgtcatgtctcgaatcgcgccattttcattaatggcaggttgtttatacagttgaaagtcgacctttttattttcctatactcattccgaactggattgactcttgtggttttattctcaattttatgctattttatttggtgtgtttgtcaaactggagaacggag

SEQ ID NO: 116244 - DNA, 475 bp, Physcomitrella patens
  Intron number 2 from transcript Pp1s14_116V6.1 (locus Pp1s 14_116V6) derived from phytozome v7.0 (chr-ID scaffold_14; pos 762473 to 762947)
aagggggtccttgtggagtcttggctccaattcaagtgagtttgtgtacctcaccagtattctcctttcaggggtctcgatgccttagtactactaagggcggatacatccctcacttcgaactgctgtcgttctgaaaagtcgttacaaagattcgttgaagactgccttacataaaaagaaccgaaattacatattaatctaaaacgttgatgcagtcagtcgaccgtctgaatagcagaatataaaaatctgatgtttcaatatgcacgtagctgcacttggggaatgttagctgatccaattgtcggacatccgcactaggagttgataggttttagattgttgtgaagcaatttgaattcgaagcagacaaacggttcgttatttagtggcagaagtctgaaaatcctgaagggtctcattgtttttgacaacaggctttggttttgaagtatcttttatttataacgga

SEQ ID NO: 116245 - DNA, 584 bp, Physcomitrella patens
  Intron number 2 from transcript Pp1s10_248V6.4 (locus Pp1s 10_248V6) derived from phytozome v7.0 (chr-ID scaffold_10; pos 1903667 to 1904250 reverse strand)
gcagggtgtgttagtctcttctttggataacttcctttctcattgtttcaatttcactggccttgctgttgtatttttcttttgattcttgattcgtcagagcaccgcctcaattatttgtcaatcctcggtttgcaattcccgtgtgagcaccaatggagctactttgccgtgcgaagatgagtaatttaaaggcttacttgagttagtagtgcatacgctatattctacacgtcgattctgattccttctagaatcggtataccttcatgccaactgcaatagtcatgaatcgccttatagcgtaatcaatgtgtgtagtagtgcataaaccttcaagtgaaattgataacagctttcggacgcagtgcagatcatctgtatgtcacagctaccgacactctacggtctcgtcgcaacgactcattttctactccctaaattaccctgtgttatgagcccctacatcgcgttgatgttgtgggaactagttctcgtttcttccttcgtatggcctgatcacctagaagtaatatgcactgctgccaggtacgacgtcactgtgtggaacagatccaccagca

SEQ ID NO: 116246 - DNA, 488 bp, Physcomitrella patens
  Intron number 1 from transcript Pp1s144_107V6.1 (locus Pp1 s144_107V6) derived from phytozome v7.0 (chr-ID scaffold_1 44; pos 802263 to 802750)
gatacataaacctcaggttcgtttctgaacatcgattaataacaaatttcttcaaagaaactgatgatagatgaagctgtcggtgaactttatttttctttttgtcttttttttttccttcactctcactggctactaagatgaggaatggaggaggctcgttcatcttgtttgacagggttttgttagtctacctcgatgcttatcttgttcatgaattggattagtttagatcattagggttgtgtctctttgttatgtcttatccagttcagcacaagtttatgtgttgttgatctctcatgaatctatcaatttctttcttgtgaatcagtctgtgtgtttgtatgtgaccttcatgatatcaaagaattgttagacctttccatgagtttctggggagattgaaccgagtagttaattttcatgacaaggaattgcattgttcttgaggaagccaggctttcaagatcatcaaacttttatca

SEQ ID NO: 116247 - DNA, 707 bp, Physcomitrella patens
  Intron number 2 from transcript Pp1s31_66V6.1 (locus Pp1s3 1_66V6) derived from phytozome v7.0 (chr-ID scaffold_31; p os 356466 to 357172)
agtacgagccagttggcatctacatttatcgcccatattagatagttttcttacatgttttggaatcctcgatcaagaaattgctggtttggttatttcaatcgtggcagacgtgcaaacagacattcagatgcacctcgtgattgaatgtgcaaatgtatgataagataagcctcgcgatgctattgtatgaagcttaagttttactgatttggttggtatttgaatgtggttcaacttttcagtcgttattcagttccagtctcttcattatgacaaagttcgaatcaaaatcgtgttgcttagctgatgtttcgtgtcttcccttgtctaatgtaaatcattctggaaaattaaccaatgttttcgaacaaattttaaagtgagtgcttgagtagaccttaacccaagaaactaactttttgttgaaagctatcgttatgagtcggtgtagaatcaattgcaaagaaatgtttggtagagtagaattttgtggagtaacctgtcctcactgactctaagtgcgaaagcagaattaagatacaggagaataagttcaactagccgttttttcttttccatggtgaaaatagaatcgcagatgttgtctttgcagaatgtatagcaactatcttttaatctgaagagatgttgaacacttgaaccttgtgccatgacatcaaacagggaatagtcctaaaacaata

SEQ ID NO: 116248 - DNA, 502 bp, Physcomitrella patens
  Intron number 1 from transcript Pp1s371_56V6.1 (locus Pp1s 371_56V6) derived from phytozome v7.0 (chr-ID scaffold_371 ; pos 298610 to 299111)
gattgtgagaacctacgggaattcgactgctgcaggtttgtctcacaccagcgggggtgggttctcacgggtttgattggtagggactgatgctgttattgatttgtaagactcatgaatcttgtttctactaatagtcgtgttttgaataattgctagccatcctcatgtgaagttgggttacaaatgtcttcaaggtatcaacattctttacttctttgttcaggatttttgatgcaccgtggaaactaacgctagggtcacaataatcccaaaaaaggtcttgaggcctgcaatcattttctgttctggtgtctttctttaaggtcagtgttcactcaatcagtagttggtacatgggtatcagtcaactgttgcaatgctttacttctcttggtttcgagattttcagtccacatacctgaccttcagatctttcagattttcagatgtattggtactttcagatcagtgggcatcggagatcaacgagttgcagcaa

SEQ ID NO: 116249 - DNA, 371 bp, Physcomitrella patens
  Intron number 2 from transcript Pp1s3_424V6.1 (locus Pp1s3 _424V6) derived from phytozome v7.0 (chr-ID scaffold_3; po s 2521235 to 2521605)
agtctggagaggtcaaacgtacacaggtaaacggaggtccgtacccatctaggtagacttgagatcccttcttcttttgagtttgtacatgtaacttcgtgtccatgatttcgaacctaggtttgaacgttttgcataggatgttatcccaccagctggtcattatgttgtgagttttaatgtgctctttaattgcatggagaatcgttcaagctggacatgcatttttgcggaaagtatattctaaataatactgtgtttatgataattctcttcagtgagtacaggcatctcgaggaccaaattggatctgaataatttccacccactaccaagggaggtgcttctagatactttcgtgacctacctaa

SEQ ID NO: 116250 - DNA, 726 bp, Physcomitrella patens
  Intron number 1 from transcript Pp1s414_22V6.1 (locus Pp1s 414_22V6) derived from phytozome v7.0 (chr-ID scaffold_414 ; pos 243634 to 244359 reverse strand)
acttggtgagtggggctggctggttaattcctggtcggttcttcgatttgtgggtttttgtagttttcgtgtttttgtgacgtgggtcgcatggggattgtggtctgtttgctttcgatggcggtgcgtttgttgagcggagaggaggctggctgtgagcgagtttaggtggtgcatacttttgaccacgaactgtgctgaaaccctacatttgatcgggagtgatgagatgcggtaggaactggaattgggtagagttttgaatgattgttcagctcgaggtgatgaaattgtagcagttcttggaggtcctgtagttaatgaggcatttttggcggggaggacatggtagtgagacattttcagcttttttattacctatttaggtttcgagggagtgtgtgtatattgattaggtcaatagttttttgtgtttggaaaaccctagagtggtttaatacttgtttggtattctgacttaaggcagatataagttaagaacggattttcaattgagtattgtgcattatgttatgtggtgatgacggcggcttttgacattgtttcagcagttaacgtgcattggattataactcttcttcgatgtgggcgacgctgaatgccgttaattcaagcttgttacagctcaaaactaatttcaattctcgttacgaatgaattttttttgcagtctgaggaagatcttgctcttaagcagcagttgga

SEQ ID NO: 116251 - DNA, 558 bp, Physcomitrella patens
  Intron number 3 from transcript Pp1s198_53V6.1 (locus Pp1s 198_53V6) derived from phytozome v7.0 (chr-ID scaffold_198 ; pos 275395 to 275952)
atattaaacgacttcgactatctcgaaataagaaggttagtgttttctaatgttggttgtcgtcaacagcactttgacgctagtatctgaattaacgttcgagcccggctagtttcggtggtggttaatcgtgtacatggtaatacaagtaatttttgttttttatttttatttgttgaagttaccacctcaaattccctaaccttgatgttgacagtaaatcactctgttctcggtttatgaaagcgtgcgcgtacaatatttgtttcattgatacattagatttcgtttttgtattgttagtcggtttagaatttctggtgcattggtggcaagagaagaaaagcttcagtctctttgagttagttcgacaggcttgccatgcacactttctcgcatacctacgttctcagttctatatctggcttctgaatgacaatgcatgcctcacgttcagattccttttcaaaccaaattagtatgccgcacgattttaacaatttggtttctactcggtttacagacggggaaatcgaagcattacgcatttatcgaatt

SEQ ID NO: 116252 - DNA, 684 bp, Physcomitrella patens
  Intron number 1 from transcript Pp1s371_2V6.2 (locus Pp1s3 71_2V6) derived from phytozome v7.0 (chr-ID scaffold_371; pos 25545 to 26228 reverse strand)
aaggtgcagtccctcaattcttgaattctgaggtatgtgagtgggttccgctacgttgaacttcacgactatacacttttgtgtcttgggggtcagtagtagtcctgtccctcgatcgatccgcacgtgacgtagggtcactcggtgatgaaagctgctcgtggtcttgagaagaaaagttcgaggacttcgcgttgttttgctagaaggctagtatctttgagtagaatgcgtgaaggtttttgttggaagttttcttaggattgcattctttcaattcctgccccaattctggtgcttgattgcggttgaatgacgaaggtttgttatgtgttcctccccgttcaagcatgggcattggctcaggttttgtttcttactgctgagcagtgtgatagcgtttctcaagcaagctgtctctttttcttgggctggggttctctgcctttgggtcgctgtggtgccgtaatagtggattgtagtagtacacgcattcagtccaccgtttacggagtgtttttgattgtagttttctcctctgtaagacatagacgtatggtcgcgttctaattttgctcgttatgtgtatttctcgtcgctggattagagtgctttttttgtttggtttctgttttaattattagtcgttctcttctgcaggcttcactcccagagcaatcaaac

SEQ ID NO: 116253 - DNA, 1041 bp, Physcomitrella patens
  Intron number 2 from transcript Pp1s34_109V6.1 (locus Pp1s 34_109V6) derived from phytozome v7.0 (chr-ID scaffold_34; pos 572859 to 573899 reverse strand)
cgctagcagcgtctgccgttcttggcgttcgtttggtctgtggtgttgatctctcttggtcttagattgtatgcgtgctctcgtgtcactgaccatgctgatgcttatgaggtccatgacttgatcagtttcaggactggcatcgatttcctaattgtgaaagggatcttcctgatttgttcgatattggcgaactttcacttcagttcctgttctcgtgatccgcagtctttgttacggttgcgtagatgcggttgtgattgtccgattcgatgaactaaacgagctgttgtgtcgagcgactataaagttagtatcataaaagttgagtttcgatggatgaattggctgctcgttctgctcgagggtaaatcgaagtttgtggatgcgtcaaggctggagtgattgggataccttctttggagactattagaagctaaaatttgattccgcagggtatacatgttggatctggtgttaacacggtttcttctgtgaggacgctgttctgctttctttatcagatatagcttacttcttaagagttcctttatacactggtcttttaagcaattgttttatagacaggtactacagtcattttgggcttgtggggatctttattttttatttgttgttgtccctctctcgacattaaaaatggacacacgataatgataactcccgctaaggtgttatcgtgacggacattcacgcccttcttactcgtgtttatcttggatattgaagatgaaagtgcaaagcacgtaggaaagcgaccatttagttcctgtcattcacgcaagtttcccgttaagcaaaatgaacacttaatcaactatgttaaagtagactatgattaccatgttgaggtattgggacagtggtctggaaaacaagggatttatggctcaatgggttttgttacatggttttgaaagtttcaatgtgagtaagtagtcagtccatcacaggatgtgttatggtgattctaatagtgtagcaacgtgcagtacgagaaggtcagctgtggaaaggact

SEQ ID NO: 116254 - DNA, 888 bp, Physcomitrella patens
  Intron number 1 from transcript Pp1s19_200V6.1 (locus Pp1s 19_200V6) derived from phytozome v7.0 (chr-ID scaffold_19; pos 1382036 to 1382923 reverse strand)
acggcttgaccctgataagaaattacactttctatgtaagtttgcagacaaagttaacacatgttcatttcctgtttcgccacatgttgcgcctctcctcaatggatttcctgtgttgaattcttgtcctattctctctttgacttattttagttcaaaatggatggggctgttaggggacaacatattagccgaaggtgcttttcatagactcgggtgattagtccaggagtgtagtggattacgatattcgcttgtcgttgggcctcgcctctttcaaagaattaatttacaggagattgccgatccgtaaatgttaacctacatccctgaaaattctgatgtagaatcgattggcagatgtagcacacaatactgaagagcttgattattgatatagaattttgtattctagttaagtcttcgttatcataggatataaaacaatgcaatttagaagggcaagtctcactttctgtaactctgctcaagtgactatctggtagaatgccgttgctgtttagtgcttgatcctgaggatgctgtgttcagtctgtattatctccaagccttttttccgaagtgtaactagattaatttactcgtgtaaggaacaagtatttgattctctatgttaagctggctgttcaacacgctgttttcctaattcatcactgacagggattgttcaagtagtttgtcagtagtgatcgtcaacaaaaaaaacgtagatcgttcttttatttctatgcatgaaccagctgatccattgtttgggaatggaatttttttattgtgatggtgagttatcatctcatcttaaattaagtaattcatttgtaattcttaatagacgaacctggaaaacaagtttcaagcgcaatcaag

SEQ ID NO: 116255 - DNA, 794 bp, Physcomitrella patens
  Intron number 2 from transcript Pp1s357_31V6.1 (locus Pp1s 357_31V6) derived from phytozome v7.0 (chr-ID scaffold_357 ; pos 199440 to 200233)
ctggctattctctcctgcgcaagttgcttgtcttttgcaaccattgtgagctctaaatctctctctctaacgattgtaggttttgattatgttccctcgtagcgagagtgctcttcgcacacaaccgattcaaaatcttctttggaagcgagtagttttcaatcatgaaatgtatctcatgcactttcttacacatagtcgtggggaatggttgagtgctgttttcattgtgaactctcgagaatctttcagttttttgaagaggtcgtcagactttgtggagtatatttcatcgtccatcttgctgcttgtttctcaaacttgaactgaatttcgagaatatattttgcgtgatcacctttaagctcaaggctggatttctgtagtaaggtgttattcaaactgttcttttagtgttcattttgctgcttttatcatgaacagaaacgggaagtaaagtttgattactctggagcggtatgggattgctggtaacttcctttgtctctaattattggtttagggtatcaggaaatgtacagtcatcgtagctccagctacagcagaggggttcatattacatgagttgtcgtgtaaagccatcatcataattatcttatttcacgcgtacagagtaattggacttcctagcctgcagtcacctcgatgccctgctaatacagaatttggaatctttgtcaaacttcactctcattccagacgttgaacgatcagatgattattctgttatacaactggtatgcagcttgaatcggcccgttcttttgcaaaca

SEQ ID NO: 116256 - DNA, 457 bp, Physcomitrella patens
  Intron number 2 from transcript Pp1s255_26V6.2 (locus Pp1s 255_26V6) derived from phytozome v7.0 (chr-ID scaffold_255 ; pos 396861 to 397317 reverse strand)
ttattgcggacgcggcacattctgcgtcggacattgtatgtgattgttactctgcttgacattctatttatttttgttttgaaattattaggccgcgtgtaacccactacatgaacccctcgtctcttcagcgaaggcgtttgtcaatcaagtcgtgtaattgcttgacatagcagtagatttaatttttctttgtgaggatccccgttatagtcggggtccttgggtgtttgtggtcgctagcgccaatggatgaggactttgtaaatttggcgtagtattccgttttgatattacagtagctttaacaatagttggggtgacatagagttgctgccatatacctgtggactacgctaaattcttctgcaggaactagtattggaaagtacatgacttgtaacttgcatggcgtggcctaggtgttgagtggagttgcattgtggacgtcaaaagc

SEQ ID NO: 116257 - DNA, 359 bp, Physcomitrella patens
  Intron number 1 from transcript Pp1s23_259V6.1 (locus Pp1s 23_259V6) derived from phytozome v7.0 (chr-ID scaffold_23; pos 1896356 to 1896714)
gattccaccaggtttgtccttccgaaactctattcgcagattgtcttcaggcgtggaattgcactttgtgggacaagctcgccgctagcatcgtcgataattggggatcattttctctaaaaataaatattacaatgtttgtggatccgtatctgaaacaaggatgataggttacacaatcgccgaaatcatcgctcacagtgagactggaggaacaggtcgtgattctaccacatagtgaaatatctcttcccctttacgtcaagttacatcaaaagacataaggaaacgaaacgaaaagagaaaggggcttcgtctgaggtgggtcagtctgaggaatccgtgtaatttgaacacag

SEQ ID NO: 116258 - DNA, 495 bp, Physcomitrella patens
  Intron number 2 from transcript Pp1s45_71V6.1 (locus Pp1s4 5_71V6) derived from phytozome v7.0 (chr-ID scaffold_45; p os 483886 to 484380 reverse strand)
aaagcaaagtgctggcgaattgagggtccagaaaggtccttctctatctctgtcgttgcccttcttctcactacttttgcatccttcttcttcttgtttgtgccctgtgctaaatttggattgtcacatgatctggtggacttgatagtttctttgatctgacctgctttttcagttggctttgtgattgagagctgcttacctgcttcatttggatgttgtctgttgtagaagacaagaagctcccacttggtattgatactgtatattctgcgtacttcttctgaatgtccacctgtctttcctcatttctgcccaatgctgtgcgctccaaattcttcatggagtcgtcagttgtgaggattgtgttcatctgcaaaacatttcgtcacattgtgcattatgtagtgtcataatcgtttggtctcgcttagtgttattaatgcggttaatttttcagatataagtgagttgaacctggccaagacaaccacc

SEQ ID NO: 116259 - DNA, 668 bp, Physcomitrella patens
  Intron number 1 from transcript Pp1s169_131V6.1 (locus Pp1 s169_131V6) derived from phytozome v7.0 (chr-ID scaffold_1 69; pos 727133 to 727800 reverse strand)
attgaaacacccgatctctggaacatcattgcgatatatcctttcactgcatttctaagtctttggattatttgaggttttgttggaaaatcgggattgctgcacttatagcatgcaatttttggttgaagatcgtggcgcaaagactcggtcttctgtgacaatgaacagagtgactggagttttgtgcttcgaatgccttatttttgtgccatgatcgcgagcgtagcagtgcagacgacgctaattgttgagttgctcaatttaacaatagtaatgcgtttgcttctacgtcaggccctaggggattgaaatgattagtggtggaacttttgatgaaagcgtaccctataagcattggttcaattaattgctttcgtgtcgttcttttaacgatcttcttgattataatgcgtttcattatattcagagaatttaaccacatgctatgtttgctacagtgtgagaacttctttctgattgtaactcatatgcggtacatagcttttgaagtgatgggggtgtaaattacgtcttgcgtacttgtagttttagttgaacttggatatgcacagtcatttgacacaatttgtctttcaatactcatgattttgagatatccttgaccgttcgcactgtgggttgagaagcctaacgtaagcccgcca

SEQ ID NO: 116260 - DNA, 942 bp, Physcomitrella patens
  Intron number 1 from transcript Pp1s118_67V6.1 (locus Pp1s 118_67V6) derived from phytozome v7.0 (chr-ID scaffold_118 ; pos 366964 to 367905 reverse strand)
cttgttcctggggtcaatcatcactccttaaccttgtaagtcaaatttagaatcttttttatttacatgttttttcaatcctgttcgtatgttgacctcgaccttgagtcactatttttcctcgtatacgaaatatgatcacttgctccaactgtctccaccatattactctcattttatcacaggtcattagatcgtccgcgaccatgtttgcaggttatcgaaaatatagtttaaaagttatttgttgagtattactgtagttgcgtgcatctaacatcgaatccactcccgggctctgttcaatggccatggagtcagaagtgcatcgctgaaagtcttttaaaactttaagtaaaaaaaatgtgagcgtcctacctgaatggaagaacatatttgagtaattaatttggacagccacaaatcaaagtattctaggcctatgtaagcaacaaagatgcagaggcttaacggacctgaaatattgctgaagcagaagcagtataaattaacgacaagacagaatgaatcggaagcgatactgtttttcttttggaactcacgatgtaggactaactcctagaggaggtaacactttgcccttatggcaaccgatactgacatgatcaactcaaggacccgacatgttgagactagcttgcagtatcctcctctacgtagtccatctgtgcttgtttacaaagatctgtatattttctagcaggaagatggcttaccttatttcattcgcaactttacttgttgtaagcagtgacgattgctagcagatgctaaccacctagatctggaaaagacatgtaattgtgtacatcgtgcctatgaagcacgaaacaatgtcgtcaaaatggcttttgatcgaagacatacctccgtgcttgcattgcaggatctcgctaatccattgctagagaagtctctcaa

SEQ ID NO: 116261 - DNA, 459 bp, Physcomitrella patens
  Intron number 3 from transcript Pp1s281_20V6.1 (locus Pp1s 281_20V6) derived from phytozome v7.0 (chr-ID scaffold_281 ; pos 98977 to 99435 reverse strand)
ctcaatctgaagatttgtcgcaaggtaaggttttaagtgttctcagttgtaacgatggatctacttgcccttctcacacctcttctattcactttttctttgctagtgtttcttaatgtttagttttaatttttttttgctttgtgaaccttttgatgggatcagatttattgacgttaaaaaaaatatcatgtttcacattcggattttgcacctaagcagttgacacttcatgttactccttctgcatgtataacgctgtagtagatgattattataagccctttcacacgtactcacacacgcagttgcctctcgtgttatgtaaatgctcatgttttctttttgtgctcgcttttgcgttctgtgatatctcaaatttgaagcgttgagaaacttgactaaatttatgggattaactattgtgttttaaatggagcagtttccaggacaaagtca

SEQ ID NO: 116262 - DNA, 589 bp, Physcomitrella patens
  Intron number 1 from transcript Pp1s10_298V6.1 (locus Pp1s 10_298V6) derived from phytozome v7.0 (chr-ID scaffold_10; pos 2293529 to 2294117 reverse strand)
ccttctccaatctgaagttccctgttcctgctcctgtaagcctccgcccaaacccctttccacttctctctttcatctatcgggaggctccttgtaaaagcgtctagtttcttaagtatagattttggagggcttttccaaggaatcagctgaacccgatcctccttgtatactgatgacatcaccgtgttttatggcgtgcttgatcttaatggtctcaatgggcacgaatatcttatggtcctagctactattagaagatcaattttgacactaggttttcttatgcgtcttggcttcgatctagaaggaattagcatcactgtcgaagcggtttctttctcacggcaacccctctgtatctttcgcctcttgtgggaatttgatatcgtctagctagagctaattatttgagcgttttttgagttggttttctttttgctatcattctaactccacgctaattgtctaatctacaaatttctttaccaatttagcctgggcttggtagcatatttagatgagtgattaatatgtacttgggtaattcttgtgcagacgagagcaggccgcggtccaattttcgagg

SEQ ID NO: 116263 - DNA, 437 bp, Physcomitrella patens
  Intron number 2 from transcript Pp1s117_62V6.2 (locus Pp1s 117_62V6) derived from phytozome v7.0 (chr-ID scaffold_117 ; pos 546298 to 546734)
cccaggctggcaatcaactcagtacaactgtggaggtaatactattttcaattgtcacttgatgcaaccttcgtcttgtttcaatacttattcaagttcggtgttttcccaatggccagtaaatgccccatagaaaataacccttcatgaggagaagggtatgggaaatgagtgatactttgattgtttttttcactcttggtcttaatcctccatgtagtaaccctagttcatcttcgcatccttcaattttacattttgaatttgaatcaggaggcacccgcacattctagctggaggaactcttgtttaataaggaatatgtggtgaactttcatgagcggaagtctttttgattttcctttcagcgcagatttttaatattcaatttgaaattgtgttgatatttcagggtattaaacggacgtccagcctcg

SEQ ID NO: 116264 - DNA, 656 bp, Physcomitrella patens
  Intron number 1 from transcript Pp1s40_269V6.1 (locus Pp1s 40_269V6) derived from phytozome v7.0 (chr-ID scaffold_40; pos 2103889 to 2104544 reverse strand)
cataggagatccgttcttcgttgcaggtaatatgaacacctttcgtctcattcatgcttcgtctgtgaaccgatccctcagtgaagctgatcagcggtgtcgagaattattcttctctgtgataagagtcgtctgtttggtgttagtgttggaacgaaacatgtgaaactacagagttcggttccaagttttctgatttgtcgaatttcgaaattttctagagctacgttgcgttttagattggttgatgccgtaatctcacaatttttttccatttgtattttggctttttaaagagcctaaaggtatttcatgtcgaggctggtcttggagacctgccatgtagttctttgatgggtgactgaaatatcgtaggcactcgggtcgagtatattatttcaaaatggaagctatcctgattttgattacttaactggaggtcaggataacatctggcacactgaatttagacagaaaagaagttgcatccagtgtcaatcaagattacgattggatatctatccaagtgttgctgtgcagtcaatgtcaagtcaagagaaagcgaacactgtacgtaaatctaagtctgttctgagaactagctgaaattcttatcatcaatttcagctgaagcgacgggattctgattgcaggtc

SEQ ID NO: 116265 - DNA, 985 bp, Physcomitrella patens
  Intron number 1 from transcript Pp1s54_149V6.1 (locus Pp1s 54_149V6) derived from phytozome v7.0 (chr-ID scaffold_54; pos 957376 to 958360 reverse strand)
tgtaccgctcctacattgcgctcggacaataccaggtgagagagagagagagagagagagagagcagcgttgttgtgttgtgagcagaccgagcagttagtttatttttatttattttttgtcttttttggtgggagtggaattttaagtgcctttcgacagggttcccgtgcatttgcgggggggtttcccgcccgcgggtgctagtgtgatgtcgggtttgatgtttcgagtgtttaagcgaggcgcggtgtacttcttgagagaagcgatgagtgtcgtctagtagttgtgtagtttggcctgggagtacgatcttcatttgagagcgtcttttgtggacttaaggttaacctgacaggtcgaatggtaatcctacattgcaccctattccagtactatattcgggtgcattttgagctcagtgacatccatgtcttcaattgtggatcggagcgcatgtttctaagtctccctctccctgcagatcttccctctacctgtgatctagatctattgcggtgctaatgactcactcgagattaccttcgctgctattgtggaaaatagagatgcaggtgcaattgtctttcgtgtgtagtggcgcttccgtcctcggatgctgattttcatctttgattactagaatgttcttaattcttagtttccggatcaaggatgttcatcgtccatcagtttgcaaggatctatagcattctactgccaatttttcgtatgaggatctatggttattcgttaaaggttagaagtctattatttttattcaccatcgctacaattcagcttattgcactgaaaccatgatcttctctcgttgtagtttttttgagtgcgcgcactatagtttacctctacacataatttagccacattcttgctattctactgcaggattctctccttgtttctcctctatttcccgctaatatatgtttcactgttaatgaaacccagctagtaattg

SEQ ID NO: 116266 - DNA, 953 bp, Physcomitrella patens
  Intron number 1 from transcript Pp1s375_12V6.1 (locus Pp1s 375_12V6) derived from phytozome v7.0 (chr-ID scaffold_375 ; pos 61247 to 62199)
gctgggtacaaatttatatcggaggtaatgtgttgtcaacgaatgtctcaatgtgtgttaatttgatgacgcagatgactgcattgttaggttattgtgattattattatttttttggagagcatcgtgtctaactctgtgttgtgcgagtttcttccgtgtctataatgtgcttgttttgacggtatcggggagcatgtgcatgtcagggattgttttctgcgattcgctttattccctaaggtggagtgatatagctggtatatctattaagtggtttcagtctggcttgcggtgtgttggacctcaaacttctgaattcgtgacgggtaaaggcttccggttttagtcgcagcagtgtctgtgcgagattagacttccctttctcggaagaattattcagtgtgagttccgatgcccactttgatatacttgaatgttgacacaagtttgactggggttctccacctcattctttgtatctcacaaatgaactttgaattcattcatgagtatgaatggcgacaagtcgacatgaattagagtatttgaagtttcgaagtcgttaggttggcgaaaccggtgtaggagggagcccttgacacagttcggcagcatcttgtaaattgactcaccgattaacgtttttgaatgtaaggaggctgtcagaaaagcgttaatggagttgggacagtgagacggttttagatcctacatacgaacttctattttttttttttttttttttttttttttggccttgaatgctattacagaattacgcaaaccgtcttggtttagcattcatcatataatttaatcaattagttttttcagctctgtaaaacatatgacttcattctgtgtaattagacgtcagaggtgaaagagtggaaatagttggatgcggcacttgaatgatatgatggtggcgtgctgactggcagatttta

SEQ ID NO: 116267 - DNA, 499 bp, Physcomitrella patens
  Intron number 2 from transcript Pp1s375_12V6.1 (locus Pp1s 375_12V6) derived from phytozome v7.0 (chr-ID scaffold_375 ; pos 62526 to 63024)
caccgatttcttctctctcgaagttcgtatttcaggttgggatccttaagtcgcaactagtagattcgcatttattgattaaatctctaagaatgacgttgagataaagcatagaaggcatgtattcaaacatgagcttcttatgatgttacttcgataattcaactttgagattttcggatgtatgcttcgattgtcgagtggagtttttttttttttttttttttttttttttttttttgttgagaaagaagacgattgttaagatattttccgtttgccaataaactctaacccgtaaattttgaattaagatgctgtattatcgttgttttatgtttgaagtatggtgaaacagtgatgctcgtaaacaagggaaactgatgtacgatatgctagttttgctacgtgaaagacgctgcttctgttccattttcagtgtgtttttgtggaggtttgaataattaatgttcttgttcgtttggttgcatccagaaaa

SEQ ID NO: 116268 - DNA, 409 bp, Physcomitrella patens
  Intron number 1 from transcript Pp1s55_207V6.1 (locus Pp1s 55_207V6) derived from phytozome v7.0 (chr-ID scaffold_55; pos 1301643 to 1302051 reverse strand)
tgtgtacttgcgcgcaggagcttgtgacttcggaggtggggtggcttgttgggttttagagttctgctgtgacggcgtttgatattgtcttgttttgtttttgttgtctttcaatttttgaagcaagcagaaaattcttccactgtagttttgttttgttttgttttgttttgtttttttccacacaccctccctctcacgataattgataggcatgaatggtagttctggtgtagcccttgggttgctgtggatatgcgatcttgagaacatggggaggatttaaaattgggagatataattttatttttattcgagaatggaatgattgagtagacgacactggcgtttggttttggttgtgatcacggcagggtgcgtgtgaagcatagaacgaagcctcttggtt

SEQ ID NO: 116269 - DNA, 425 bp, Physcomitrella patens
  Intron number 1 from transcript Pp1s298_14V6.1 (locus Pp1s 298_14V6) derived from phytozome v7.0 (chr-ID scaffold_298 ; pos 177532 to 177956)
tgtagcacaggtttgaaattccattctcttccggttgtgcatgtgcattccttgggcaagggttaatctttacctcccagacgccgtccagcagattaatgaacattcagatgagagctacggcaaatcgattcctaacaatcaaaatcggaacctgtttcttttttatgttaggcaatgctcgattttctgagctcttgaacatccacgcagttgcgaggtgaaattttattgatgatggaaaccgttcaagaagagagtccttctctcatcagcagcccaaaatgttttgtctctagaatgtcgactgtctgcattgcgatgtttatcacatgcttgtattcagagggtagacagtttttttgaaagaccagtggaatcgttttgcaggtcagtgtgtggacattgggctcggctgcgaactc

SEQ ID NO: 116270 - DNA, 1017 bp, Physcomitrella patens
  Intron number 4 from transcript Pp1s249_59V6.1 (locus Pp1s 249_59V6) derived from phytozome v7.0 (chr-ID scaffold_249 ; pos 339874 to 340890 reverse strand)
atcctattagtgtggctgttggaggtgattcttctgctccaatattttcacaattttaaagacaagaatgtatgcttgacttttcgacttactaactgtagctttcgaaattacgtacaagtatcgtcacagaactccaagcttccttcgtaatacaacatcggctggagcttcttttacagcccttttgagcgttcataaatcttcaccttgtgtttctaatagagtttttatttatttatttatttatttctgtccctgcatatcctcgtcttgcagcatatctcctttctttgtgggaggaatctatactctttttttcggttcattagctgcacctcttctctagtcatgtatgtcagtatttttcttttctcataacgtatttactggagtctgtttaatgggaaccgcaacgtgttttcaactctgatcccttcttaatacttgcagttctttggaaatctggattttcaacatagagggactcttcttgctgcttggaatgggaaatttgtgaattctttctacttaactttctgaaacttactaggtggtgaaaccaactgatatcaatctcactcctaaagtaaatagatgccgttgttgcatttgaataccgtaatcatacaacacagatggagttttgtggataggatgaaaacaaccaaacatgtatggggactgaacaatgctcatgtgtggaaatgtttggtgcgttttactaatttggttgtaggtttttttttgtttttcgcaactgtaaccaacatttcgctcattgcaccttttgatttgaaatacacttctcacctttagttgttgtgtttgtcgttttcaagtacatcttggttactacaaataatctcgttattacagagatctgactttggtttgttgtctattttcgtgcatatggttactcttcatcctgttctctatgttatccatttggctagtactgaggtttcattattattatcttttcttttttttgggttatgaacaggacctgtg

SEQ ID NO: 116271 - DNA, 243 bp, Physcomitrella patens
  Intron number 4 from transcript Pp1s375_10V6.2 (locus Pp1s 375_10V6) derived from phytozome v7.0 (chr-ID scaffold_375 ; pos 57859 to 58101)
gggttcgtgagccaccccagaggttcaggcgcaaggtcagtgttgtcatatcaaattcttgttttgtttgaaaatggttttgctttctcggtctttgtgaagaaggcagaattagatccggttaattattctatgttcttgggattgtagataccacccggcttaattagttttgtctctgtggtgctgcgtgtcgatctcttcatgccgtttctaaaagagcacagcattccatgcaggagg

SEQ ID NO: 116272 - DNA, 709 bp, Physcomitrella patens
  Intron number 1 from transcript Pp1s122_10V6.1 (locus Pp1s 122_10V6) derived from phytozome v7.0 (chr-ID scaffold_122 ; pos 144099 to 144807)
ggcgtctggaccgaaaaatcatctgtgagattttggtatgtttcttgtttcgtgtttgattcaatttctgaatacttagggattttgaactctacgagtggtttttagttacatgattgttgttttctgctcattgacagtgctagagtcgtgaattcttggttctgaaacggtcactaactaacgttgatttaatggagccagaattccgcactgctggcatttctcttggcttaatacgtggtcgtccttgtcggaccttgcaaaacagtcctgatcttcatgttgcaggattggatagatgcttggttgttggtttctcaggcgaaggtttatgttacacgaaaattatatgaacataagcgtatcataatggagcaattcagaggcgtgtctgtggtcttagtaatttgagctattactggtatcagattgtgctcttcagcataaatctcttaaaggattttggcagcttcatgtccccttcagaaaaataaacctttcggtttttatttatgtgacgagtcactttaatttgtcatgaatttctttcctgatccaatcacgaataatggggttttatttatcagcactatagatcttcttttctgagcttggattattttcaagttgtacttcaccagagaccatttctccatattctgacgttcgaagctgctgctattatcacagagaggaggaaggaaac

SEQ ID NO: 116273 - DNA, 325 bp, Physcomitrella patens
  Intron number 3 from transcript Pp1s243_25V6.1 (locus Pp1s 243_25V6) derived from phytozome v7.0 (chr-ID scaffold_243 ; pos 244183 to 244507)
aacattgttttgaatctagggctgctgtaagtcttcctgcaaagttagtttcatcacattttttagcttaaaaatatcgatgtcttttggaattcaaggttctgcaagtcctaactacctgaggtttaatattttatttcatgcaatgagcattccattgaaaaattcatgatttgttaatgtgtcatttcatgttcttaaagaacatcaagttgtaatcctatcaaatgaatgttgtttttgttctggctgaaaagttgcatccggttttttttcttgtgtaacatgtgattgttctaacgatttgacttgttttgggaaacag

SEQ ID NO: 116274 - DNA, 647 bp, Physcomitrella patens
  Intron number 2 from transcript Pp1s13_201V6.2 (locus Pp1s 13_201V6) derived from phytozome v7.0 (chr-ID scaffold_13; pos 1340105 to 1340751 reverse strand)
agaaagggcattccttggtcagaggaggaacacaggtgggatttgtttttctttcaacctttcaatacattttactcgtcctctgtttatgtgactatcggctgtcccttttcacagagattctagtgtacgtaattttttcttctgatactgctttatgttgcaagcatcctttcacatagcgatgacgcttcttagtttttaggctgcatgtgttatgaaatgtgttctgagaataatgtggagaaggacttcgatctattggatggagtccatgttcctggcacatcttgagaaacttcagaaacttgttgctctattgtacagggaagggttgtggcaggaattactaagagtggtttatgagtaacaataatcataaagtacaagtgttgtatgacataatgtaatcagaacgatttatgtaacgagttaactaatacgattactgaattcgagtactggtgctactattgaattagctcttctgatgtcttcgttccattttgagcatcttctgaaagttcgtcctcgtgtttaggccactttataccatgtgaattgatggatccaattctgaaagatgtgatgcaattgctttttcctttgcaggctctttttgttagggttggccaaatttgggaagg

SEQ ID NO: 116275 - DNA, 794 bp, Physcomitrella patens
  Intron number 1 from transcript Pp1s86_218V6.1 (locus Pp1s 86_218V6) derived from phytozome v7.0 (chr-ID scaffold_86; pos 1405249 to 1406042 reverse strand)
ggatcgaggacgagctcggtgaggattttgggaaggtgggtgagtgaaggagaaacgcaatgcatttgctctgatgatcagtttccaatgagggttttgtaagctgttgtgagtagtggaattttcttagatggttgtgttttgtttctttttgttgttgttgttgttgttgtcttctctttttttgtggtttttcgattgagcgacggtttaatgctgttgatactgagggaagtgcaagtatacttgtgcgatgcgttgcagagatggattggtaatttctatgttttcccttggcggtagtgtccttcattagggtcggctggtttcagtggttcgcacgagggcagacgaccctgaatttgagagggcactcttcgtttcatcgtttggagagggcccctcaattctgaagccttattttgattcacgtgttttcaaagtgttgagtccctactcagtgattaaaaaggtagttctaatgctgtttgattggatcgcatattgggtggatctaggtcaggagcagtttggtcttggatcgatttggccacttgagagagctatgaatcgagattattttcggctatctctgaaggatctttagcacgatagttccttcctgaataaaagcaattgcagaaaactaacaattgttcgacataggtctggacgttagctcttaccaggaagtcagatgcggtgggaaagaaatagagcatttgaacataagtacaaattcttgttgtttatgtgtaggtggcaggagaccaagattgtgtagagccaagtgg

SEQ ID NO: 116276 - DNA, 664 bp, Physcomitrella patens
  Intron number 2 from transcript Pp1s13_27V6.1 (locus Pp1s1 3_27V6) derived from phytozome v7.0 (chr-ID scaffold_13; p os 147214 to 147877)
aggttggctttcctcttgccttcattaatgtttatcactcgctctcattcggtttggagttctggtatgtttggttcttctccaactcgggtcatgcgctctatctctttggcaatcctttcaacgagttgagtaaagcgacaatcatgggtaagagttgaagtatgctctgttaagctggagaaagggacatatatttaatagttttaccaacatttctcggatgatggatgctgttcgaaatctgtccggggtcgttacaggtgacttccctaccgaaaaaaaaatcatagatgtacatacatgatcatctagtgcgatttttttaatttgaggttggcagagtttgtcttgtttttggggcttaccagatagcatgtctagattgtagcatcgtagttcatggttgattaggcgcacgtactctaggagttgtgaatgaagtgtcggactcctagaagttgctttagctacgcttaggttagcagtcatctacgacttgtaaacggttatattagaagaatgataaattctgcgcatagaagtgttagtagggccttgggcgttttaatcttggtttattcaacttgctatcttcccttgaactttttcttactttgtttacctgtgaactcgctattcagattgtaacattacttctcga

SEQ ID NO: 116277 - DNA, 603 bp, Physcomitrella patens
  Intron number 1 from transcript Pp1s249_41V6.1 (locus Pp1s 249_41V6) derived from phytozome v7.0 (chr-ID scaffold_249 ; pos 270589 to 271191)
atcgtggatcgcctctgctcgcagtcttgcctagggtaattttcgtcttttcttacacagcacaagatactgtagtcgctccgtgtattcgatcattgctctgatattttcatggaatcagtctgtcgaaaattcacagggatgcttagaatttgagttttcgaaatttgcattagtatcgtaaattgcattcttctcagaattggcgctcatgttttttctttggaaaaactacaactccagcaaggctattagaagggtgtaatgcaatcatgacctaatttgcaaggccagccttgagttttatgctgacaagtagtgtgtgcgacttaacttaccatgcacactcttctacatggactcgatcctgcctgtgttgtcaggaaagaagaagaaaaagaaaaaaaaaaggaaataagatcagcttctaattatttttgcacacctagattcgattctccaactgtacttcgaaattgctgatctgatgatggcatacgttactcaggacctcaatttgtggcattcttcgaaaattttatgcatagtgttgacggtctaatctttgggtccaacagagtggtatcgacacagcgtcggaaa

SEQ ID NO: 116278 - DNA, 684 bp, Physcomitrella patens
  Intron number 2 from transcript Pp1s364_44V6.1 (locus Pp1s 364_44V6) derived from phytozome v7.0 (chr-ID scaffold_364 ; pos 246824 to 247507 reverse strand)
agactccaggggcagcggacaagcctgttttgaaggtacaggttctgtttcattcaagtatgtcgagatatatgttttggatctcatctaacaaaattttacttcagaagtatttgaggtgtagctatgctgctaacagagccaatttctcgtcatatggaaattgatagtcttcattggttccgaaaaattggcgatgatttgatgcaaggaaccatgtgctaagaatcatattgtacccctaaatgtagatgcggtatttatggattttctactgctagaagtaaattcatatttagtactgaagcttggtaatggcaaggggatggaagccatttgagattgtttcatctgtataacttcacgtctgaattaaacctgtccccatcccattgtgtttccgttgcatgacagtgtgaacctgagacatcgactaaggagtctcgttcggaggatgaggaggattcggcactattctattctgacttgatgtctctgatggtccaaatgctcttccagacccgcattaagcctgttaccgtttcgtttgagaaaggatagtaacagtagggctgtcgccaacgcttcgtaagttctctcgttttaagatataccgattataagcttgttatttaatagtgcaatgatacatgcaggttgacgtggagagtactgtcggactta

SEQ ID NO: 116279 - DNA, 495 bp, Physcomitrella patens
  Intron number 2 from transcript Pp1s245_29V6.1 (locus Pp1s 245_29V6) derived from phytozome v7.0 (chr-ID scaffold_245 ; pos 105715 to 106209 reverse strand)
atcaaggacaaggtgcggtctcttaccactaccgtacagttctgctcgtaggcatagctaaaaactgattttttatccattcgactctacaaattaagaaagaatgatttgttgcgcgtgccttcattgattgaaggaatatagtgaagaagtcggtagaagtcggggtggtggctctcagttgtcggtgcttagtatgcatttgcaggctgtttctggtatattgcgctttcaatggctcttttaaactaagagcagttgcctacagtacttcatgcgattcagggggagatcatcatattattttggtagcttgacatcaaatgccgtgaactgaagagagctttgatacttcatttttctttgaattgtctgcaattccttataattatgtctactacaagtcgcatgcagaggaattgttttaagaagtattctaattgtgctactgtatttgcagctcatattcccatttctcgacttggacctcaaata

SEQ ID NO: 116280 - DNA, 966 bp, Physcomitrella patens
  Intron number 1 from transcript Pp1s169_72V6.2 (locus Pp1s 169_72V6) derived from phytozome v7.0 (chr-ID scaffold_169 ; pos 409494 to 410459 reverse strand)
ggggcggtgggcgctgtagctctgagaggctccaggtttgacttcttgtgggattatgaattaataacataatttttggatatggggtggtgctgatggtggtgggagttctttttttttttttttttttcttttttttccttcttctctctctctctctggttaccctaattggagagtggaaggattttgagacaatgacatgttttttgggtttggagagatggggatggtgagatgagtttcgtggatctcgatgtgtggagttagggcgagggttggcactcggtatcgaccaagagagagattcacggacagggagagggcgagatgagatcgtgtaatgatagagtagcaattcgaattgttgctaattagctttaacccgcgagtgagtgtggaagcggtgttgattcagggctgggtaatttttgttagtttttgctacgaggatgttgacgatgagagtctaggtagatggttctagtccacgcggttcgcgtgagtgtatggttgatttcataggtttggaatatagccccttgtgcatgctatagggtttcatttatttttttgatattacaggggcgcttgattgtagccttgcagaagggaattgaaaggagctttgatattagtggaattaaaggtgagtgaggatagggtgttggcaattcgattgcgcatagggattgttgagcactacaagaggggcgtgtttgaggatcgatggtcctctcttaggctttcgaaagtgctgtatagtatttttttgattgaatttttccttcttgtcgattgcccgaatttcgacgattattttttacgacgatgagggttcctgtccatcttgttcttagtagaggctattacatggagagcaattcgatattcgatgttaaggtattctggtcttgtgtgagagaattcattgcctttcgttgctgtgtgtagggtaaagtaata

SEQ ID NO: 116281 - DNA, 964 bp, Physcomitrella patens
  Intron number 2 from transcript Pp1s81_135V6.1 (locus Pp1s 81_135V6) derived from phytozome v7.0 (chr-ID scaffold_81; pos 774971 to 775934 reverse strand)
tgcccacgaggtaagtgctggtttgtttatcgttttttgcctgcaaagttcagtgcttaagtatcgctaactcctcgcgaagtcatccttgttccacatctttttctttccttctgttttctttgctttctctccttttttcctcttcctcttcctccttgattctggtcatgtttatatgactaattttggttgtggtcacagtatgaatttttggaatcactgggatgtcgactatgtcttggacataaaggccttaatgatacaattaataattcgcttaattttcgatgaggtctttctttagaatttttaggcattgtgtgatagtgggaacaatgaattgctagaatgctcaactacatgtttagttttaggttatcaacaagataatgtagttgaatatctctaaaacagtgaattcacacacatacagacatgttcttctggtatctcgcattttgactaaagccaaggcgtcacaaaattaaggatcatgcttgagccagttactgaatactaaaattttaaacagaaatgttgccaattgtaacgattttcttaaaatgtttaaatcttattcattttctatgtacttcagtcaggatttgacgaagtttcttagtttgttccgattagtcgggaggccaacctgtcgagaatcgacttgtagatgaagtcgtactcacacaaagataaagataatttctattatcgctcaaagttcctgaaaatatctgattgatacaagtcgtacaagttcagaaagtgtcatcttagattcgcgttttgtaggataatacgaggacagttatgcgctgcagttggagatacagtgcgatacgttttaaaaatactgcagtagtgcaaataatttggtcgtgacagatggcgggcacgagcttacatgtatgtagacgtatggaaaactgatgatgcaggttatatattacagcgaaacaaa

SEQ ID NO: 116282 - DNA, 662 bp, Physcomitrella patens
  Intron number 1 from transcript Pp1s326_66V6.1 (locus Pp1s 326_66V6) derived from phytozome v7.0 (chr-ID scaffold_326 ; pos 400316 to 400977)
agtcgtctgcgaagctcaagaaactgtcactggaggtatgttttctgtgtggcttgcatcagttttagttttagcagaaagggaactgcatgcgtctgtgttgtgcgatgccgaggtcataattcgatgtttctcttcagttgagaaagatcactttgagtggttatgatgtgatgccattgactcagaatcttgtttaccctaagaatctaatctacatcatgtaactaggcgatgtatcaacaatatatcaagaagtcgacgtattttaagaattcgttttaatgtaggtgtatctttgtcactgcattggctggctaactgaattaagcaatatgcctgaatcagattttctattggttccgattgcctgattgcgcattagtttctttacacctggggtacacgagtacttcagttctcatgtttgagttgatagttttaagatcttctgattttcttgtagaaatgaaggtgagtagtatgacagataatctgctcaagtgtgtacttcaaaatttcatttatagatttttgtttgttgttccaatcgggtacccaattctgatgtgctccttgttttgaaacgacaatattgctttgattagtgcattgcacaactattccaactctctcgtggccttcagttgcaggggttgtca

SEQ ID NO: 116283 - DNA, 774 bp, Physcomitrella patens
  Intron number 1 from transcript Pp1s240_30V6.1 (locus Pp1s 240_30V6) derived from phytozome v7.0 (chr-ID scaffold_240 ; pos 155799 to 156572)
atcacctgggttaaaggatacagcactccccattggtacgctctcatggttcttgcctctgtgaattgcaaaaacttgttctacttttttttttgttttttttcccccctttcccctgtgttattgctctttgtggtttaattggaatctcaatcacggtgattttagcgacgcatcttgcgtatcctgcttgcatcccttgtcaagatttttttgtgtggtatttcgtgaatgaggcttgagccaaacatgggtgttgcacctttttgctggggttagttccatactcgatcaagggaatgattttttgtgtgtgtgtatgtgttgaattacgtatttctattcgtcctgaatttgtgaatttatgcatgtcatttaattcgattacactcggatgatagtgttttcatctgttcaaacgtggtgatgcacgtttttggcttgtattcgagtgaccaggctcgtgcaaaacttatttacttatttttttatttatcttcctgtcaaatttcattttagcgatgattgcttcatgcggatttgaccaagaagtgaaaacgtcatgtcactcttcttcggtcaccgtttatcatataagctgtttgttttatgtaggagcacaatgtttctactaaacggcttgagatcctattgaggcacatcagttgcgtaccctgtgaagttggtcctgtgggtataagcatttgacttgtgttgtggaacatgtttgggagtacaggcatcaccctgattgttatctggccactaagagca

SEQ ID NO: 116284 - DNA, 553 bp, Physcomitrella patens
  Intron number 1 from transcript Pp1s97_133V6.1 (locus Pp1s 97_133V6) derived from phytozome v7.0 (chr-ID scaffold_97; pos 812451 to 813003 reverse strand)
ctggtattgagattggttatagagctgccttccaagtgagttccattgccaatcccccttcgttttgcctgtcaatgttcatcttccacttgaacagttagactgtatacagatatgtttcgtgcattttttgcgagtccgaccctttgaattattgcgaactcaacctgcctgtgcgatttccgcttctcattgtggacgtcgagaaacacgttcttcactgtctcttgaaaaatcttcaccctttcggcaatgcgaagatgcaccacagcacattagtatgatacttcgaaaatatcatggaatacactatgtatcttctataggcttctttgtggattagtggagctcaaatggcaaagaattcgagtttcccgttgatgtttgttttattaatgagaggtcaatgattttactgagctatcagttgagcattgcagtcgattactgtattcatgatcgaatgtagggttgagagtatactcactatgttagttgacgatgagattatactcactattctgattgtgtttgagtgattaccaggtcatag

SEQ ID NO: 116285 - DNA, 719 bp, Physcomitrella patens
  Intron number 1 from transcript Pp1s98_144V6.1 (locus Pp1s 98_144V6) derived from phytozome v7.0 (chr-ID scaffold_98; pos 818128 to 818846 reverse strand)
acagccgcaacagatcctgggacgcaggtgcaaacttcaaaacgctggcgagcgtctagagtttggtattgtgttgagtttttttcggtgcccaaccgtgtttctcctcagaaaaccagggttgcatgaaatcagcggtttgtgctcctaacgcccaagatgaccagaagtcgtagtcgccccggaagggatttaggaaactatctggaatggtcttgaaagttaagccatttctgacctctaattgggatttttggttattgtagggagagaaaaaaaaaaaagcatccatgttgtccaataatccaatcctaccgtcatctaggcccactagtgccacatatactgaacgtcaaggataaaaaacaccgatcctggaaaaggcatttcccttatccaatcggtttccgagagttacaaagaccctaacccacaacctgaaccacgcctttgtccacctctgctcaaaatttaacgcaaacttaatcagcagcattcaaggcaaccattactgcgtcactcttctgaaaccctaaactaagccaccgagacggagataggattctttgtgtgtgcttctatatttacatacctacacacatacatacacacatttatatatatatatatatattcttttcgttttctttttcgtgtttatcatgttgggtacggtgagagtaggcgcgacgtgctccaagtcagctgtattgggcgac

SEQ ID NO: 116286 - DNA, 524 bp, Physcomitrella patens
  Intron number 1 from transcript Pp1s19_89V6.1 (locus Pp1s1 9_89V6) derived from phytozome v7.0 (chr-ID scaffold_19; p os 577607 to 578130 reverse strand)
gcatagaccctgttttgttgaggtatgttgctacgaccttgtctgaatttcttctgtttaaacctaccatgaatggactgcggggcctctagtggagacttaggacaaagagtttagtagtgtgtcgaaagattttaaactttaattcttttcctctatccagcaaaggggaagccgagtgagaacgccggaagatgtgactgagtgtcttgtaattcaattcccgtgcttgaatcataaaataccttgtcattgatagtttagtttggaaggtttgaattcctagtgtgtagtaagttttgatcacctgggtgtcaaaaaccttgtcatggccaatgttgactttgtttctgcagtattttgaagtgaatttactgaggtaaatgtaaagagcgaaaagagaaatgttgtctcgttttgtatgcattatggtttttatcctcatcgcatcattctttaagagtttcatgtctccatcgatctaatgatgcgtgctcacaatgacagagattctgtcaattctg

SEQ ID NO: 116287 - DNA, 828 bp, Physcomitrella patens
  Intron number 1 from transcript Pp1s91_146V6.1 (locus Pp1s 91_146V6) derived from phytozome v7.0 (chr-ID scaffold_91; pos 874044 to 874871)
ttgtctctggctggtgcgttcattgtccgcgtacttctttgtttgagaatcttgtgtcattgataaggtatgcttggttgccctttggcagtcgtcgtctgtcgccttgtgaatgtggattggcattgctctatatgtttactacttataagtgattgtttatgattggagtcctggtactttagaaattgagtttttggtaggggtttggtacagatttcctcagcctctgagtttttcctgtcagcctcgactttggcttttcttgtctcactgtttattttattttattttatttttcttcctgcgcatgatccaaattggtttttcttagatctgaaacgtatccgcggaggctattttgatttatagaatttcgtgtatcgcgttaggattctgttcccttggcggatttgaggtcctccatttcaacctctcttttcacgggatttatcgtctgctctcttagtttgaaatctggtcaaggagaaatttaaatataatgttgagtaatgtacattgttcgctcttttgacgttgagtacttcgacacaatcttgttcttattgagtgccctatttcattctacttgggttcggataaatcaatttttccattgggagctgccagtaatttgaatccccagttctgaataaacttgtagattgcatattgtatccacacgcaatgaacaagttcttgagactactctgtttcaactcgatatttcaatcttttgaaagtaaaaacttttttagacctcattctaattggttgtgtatggaaagatcaggtggcagaaatttttgtaatttttgaggtcgcaaa

SEQ ID NO: 116288 - DNA, 748 bp, Physcomitrella patens
  Intron number 2 from transcript Pp1s25_195V6.1 (locus Pp1s 25_195V6) derived from phytozome v7.0 (chr-ID scaffold_25; pos 1286099 to 1286846 reverse strand)
ccaaggcgcatctcgaacgactggtaggtgggttcgtcttgatgttcactattttttgtgaattgtgtactttttagtttcatgaaacttgcggatgcgaccgtggaggttggaattgtaatgcagattttcctggatgttatctgcggcgttttctagtgatgtttgagctgaaatgaattggaacttcaattcagcctagtcttgttcgtgaattatgaacatttctattccgagaatggagacttgcgctaaccttgaagttgtatatgatttgaggctcttgtacatgagttgtttaaatgaattagtctctagcaatcattatagtcggcggttttttaaaaaataggtttttatgcgcttaacttgatgtattgcgtatcgatttaagctgtttctgcttgccgggttcatcgttttctgcctgagcggacttctagagacaaatcaagatgactttcttacaaacctaatttgaagttgccatttgtttagggtaagagataattgtgtattatggcagcaacactaaacaaattgttggagtcgctatgacaatgttttgcgaaaactgctattgatatatctgtgtaaggtcaagtaatttagcagattattgttttcttggacgcgaatacgtgagcgaactgcatatcacttgcccgaagaattaattggttttatctgggcgtgctttgtttttgttgcagcaattattactaaatcagattccaacttgttttga

SEQ ID NO: 116289 - DNA, 548 bp, Physcomitrella patens
  Intron number 1 from transcript Pp1s229_58V6.1 (locus Pp1s 229_58V6) derived from phytozome v7.0 (chr-ID scaffold_229 ; pos 616106 to 616653)
caaggagccgacttctacctcttcagtcgtgcctggtaagatttttgagtttcttcaccattttttcatgacgtgggaaaacagacttgtccaattcttcagctgtagggtttggaactcttgatttcaactgtttctccttgctattcctggttccatctatgatggttgtagatttcatttcgtaatttgatccttttccccttgccacagttctctatcttttgacttttcgttgcatcccttttttcccattagttaaattcactatcctttgtaccacgtacgaagctgatagaaagctgagttatgcaacttcttttaatagtcgtgaaggaagctatagattctggaatgcactgttactagaaattggaagctgatttcactgtttttttcaacctgtgtctggatatatcggattaaatcatatcaccgtgggtatatcgccaaatgctacatgtatgtgccatcactaattttctgatttggttgcctgttgagatttatcaggacaatctcagagctttacatctacaacgcagcct

SEQ ID NO: 116290 - DNA, 763 bp, Physcomitrella patens
  Intron number 1 from transcript Pp1s10_185V6.1 (locus Pp1s 10_185V6) derived from phytozome v7.0 (chr-ID scaffold_10; pos 1384403 to 1385165 reverse strand)
ttgccatctgcatcatttcttctcctcgcagctgggtaggtttcagactattgtagtttttttgggttttgattttcatcgtggttgtgggtttttttggtgatgtgcctttggtgatgtgcgtttgcgtgtgtgtgtgtgtgtgtgttttgttttgttttttcttttggtgttggatttgagatggtttcgaggttgcgtattggggtgtttgggtttggagatggtgcggctgatattttcgccgtcgtgtggatttcttaaaaaagcgtatattcattttttttgaatttttgttttttgtctttgttagttttaattcatttttggaggagggtgtgaggaagggttgtgcatggtacttgagctgggttgaaatgaaggatttggggatcggcaattggattttagtttgaagcatttgttggaattcggggggggggggatttaattgagcgaattgaatgatttttgaatttctgtggagctgaattcgagctcttgattcggagttttcttgctattaccattaaaatccttcggtttctgaggattggatttaacgcatcctcacttgcttagtgatacgtgggtctttttaggagttagtgttttccttgtcttcagttttactccatcaagggagtcgcgggtaagttagggttggatgtcttcataagaaattttgaaaattggattaattacgcatgaattttgattcagcagtgttggacatgggtgcagacgctgcatcatccacgtt

SEQ ID NO: 116291 - DNA, 701 bp, Physcomitrella patens
  Intron number 1 from transcript Pp1s52_134V6.1 (locus Pp1s 52_134V6) derived from phytozome v7.0 (chr-ID scaffold_52; pos 1120979 to 1121679 reverse strand)
ccatcgtcctttctggaacacgctgtctgtctcaggtatgttgtcactgtactcgaaagctgcatccgtcaaaagagtctgcccacacctcggcagagattgcaattgggaggaaaattccgcggaaggacgcgttttgttcgagatggtcggtaatgtgtcggcggtgcggtttagtacgaattgatagtagtttatgtgttccttatcaaatttgagttcctgcatgtaaccgggttgaagggttttctgtgaagtgcatgattgtggctgtggagtagcagtagaagcagttgcacgcgacgtgggacagagtttgagattttttcgtcagtttaagaggaattagtatttgtgtttttctttgaggtatcgtgaagtattgaggcaactgagtgagttcttcttgaagatgtgtattgattcagttagcttttgtaaaggctgtagttctggatcgaaagttttctctaagaaatatagtgttttgtatgattcggagatggttttggaggataggctgtgcatacaggagcctgcgcgtcactgttttttcgagatttagaagctgaattcgtaacatttggatttagattgtcctcggcttgccagtcctggtaattttttactgcagtgttagttctgcacgcgtaagaattgtttaatcttgcagaaggagcgaggaagcacgcgggctcacg

SEQ ID NO: 116292 - DNA, 822 bp, Physcomitrella patens
  Intron number 1 from transcript Pp1s336_28V6.2 (locus Pp1s 336_28V6) derived from phytozome v7.0 (chr-ID scaffold_336 ; pos 111749 to 112570 reverse strand)
tataggagattgtactccagcatccgtgacggataagattttccttggacaacaaagtgtacaaacaacgtcaatcacttgagccacacttttaaggaggtatcgatcgaggtctaggttcttggtgggttgtaagtgggttcgattgttttgccccacacactccaggaatgaagatgctgtgccagtgtgggcattcctgcaacggcataggtttgaagatgtagagaacagtaagaagcttatttttatctaaatatgccgagacttgcacaatcagatgcaagttccgcattaaacagaggtcttgtcttctatttgattctgcttcgaagtggccaggagtagggtgatactatttcttcccttgtactcaagctccattgtttcgaacttgaactccaagcgaacttgattaatttgatccactttgtaggtcagttttcgtgcctctctaagatggataattaatcattcggattgcatgacagaaaagtgggaaaaacaatagaaacattgttcacctgcacgcttgttacttctaaggattgacagggcccaaagagccatcttgggtcaatagtcgtagtctttgcacggtatggttactcaagttgttgttgattgagccatgggagaagaccttgctgacttgtatgacatgtattttacgcgattcctcaagtctgattcacggaacaaatgtgcgtgcacagatgccattttcaatatcttcgtcatccaagtgagaataactagagggcgctgtcattggggtttgaggagtggggactggaccggttatggctgctaacgcagagg

SEQ ID NO: 116293 - DNA, 502 bp, Physcomitrella patens
  Intron number 1 from transcript Pp1s10_268V6.1 (locus Pp1s 10_268V6) derived from phytozome v7.0 (chr-ID scaffold_10; pos 2038319 to 2038820 reverse strand)
agttggatcgactggagagggccggcatcatcaaggtgaattgggattgctgggttcactgctcagattagggctcggtgcaatttggtggattctagttttctctgaaatttctttatctgactggtcgtttccgaagagagatcaatgggactctgcaattgtacacactttggacttcatcagtgatgtatattgctaggggattttaaaatatctgagttgggaatgtgattgaataattgggcgtcaaatgcatgcacaggttgaaggtttaggatgttgtgaggatgtgttgcgaacgttatatttggctattgagagcttgttccggatcgtgcacattttgattcttcgttttgtttttaaaagtagaattgtatttattaggtacatgttgtggaatggtttttagtgtctgcgaagttataaaatagatcagaagttttagggtatctccttgagtctctaatccgatgacctgtgcagccgtctgagcctt

SEQ ID NO: 116294 - DNA, 418 bp, Physcomitrella patens
  Intron number 1 from transcript Pp1s183_53V6.1 (locus Pp1s 183_53V6) derived from phytozome v7.0 (chr-ID scaffold_183 ; pos 388281 to 388698 reverse strand)
ctgccccactcgctcgactcacgattctttttcaggtctggtgttctttatgtcaagatattaaaatcgatgccttatttatctggaatgaggtggatggtgctttaatgcgctagagtgataatttttcatggttcaaggtcctttcatgttgatttggtgacgtatgtcttctgttcggtggattggaggtgatcaaaaatgtaattttcatcttcgtcgaatgacatagaatgtcaatgcttgtgtgaatgcatggaatacatcatgttttttgcccgaggtcctgcccgttgtggaaatgaggatttcatgggatttggatttggatttagatttgtgtatgtatttttgctccttgcatgttcacttagttactttcgttttgattgctttgttgatgttgtaggttcaaggt

SEQ ID NO: 116295 - DNA, 463 bp, Physcomitrella patens
  Intron number 2 from transcript Pp1s55_274V6.1 (locus Pp1s 55_274V6) derived from phytozome v7.0 (chr-ID scaffold_55; pos 1699621 to 1700083)
ctgtaagttgcgaacaagatttcttgccaagcaattcaagatgatttttaataatctaaacaccaatccaagaagaaacatcacaactctagacaagactccaactgcaagtgacgagggaagtttggttgcctgtagtgcaaagatgatttgcgttgctgaagaagtggaaagcggttaattacaggagctaatccggatgcaacactgtgatagagattcttttgcagatatcttgacacctcaagagagtcccactaccttcagactagattcattgtcaagatcccctggcccttcgatgccacggagaatgagctcgccttcttggcattacacagattttcaaggcatcagtcctagtttgtgatttttgatataatttcggatgatttgggcttgtttgtactggaaaccatcatgtgtagtgtggaaaattttgacgaatctggatccaaaatct

SEQ ID NO: 116296 - DNA, 780 bp, Physcomitrella patens
  Intron number 1 from transcript Pp1s19_262V6.2 (locus Pp1s 19_262V6) derived from phytozome v7.0 (chr-ID scaffold_19; pos 1861424 to 1862203 reverse strand)
agtgtggtatttatgcgtttcgtagatcgccttcagtttccttgattgtaattgataacaagaggaattagacgttgcctggaattggaaaattcttctctagattctggtttagtagttgacgaatggctgaagattgagtagtttgtttagcgtttctttctagcttgtgaattggtatggattcatggcagccttgatgtttcgctagtttatggtgatggcaatttgaagttgcgatcgtgttcctcagagaacgcttttctacactgctggctgtttgttgtttagtgccttgttttgttttgttttgttttgtttcgtgtcttagaacattgtgagctatgctcttgctctgaggttttgattgcatcgaaacctatttttcttttgcataattaaaagcagttcatgcatgagtgaacagcatattgaaatcaggcacttgatgatgctatggatgattgcaagagttactccggagtgaacaaggaaagctacgtttagcatacggagagtatagtagtcttgattcatgagtcttgtctcattttatgattggcaaccctgaaactatagcattctcttgccccctgcaggtgtcatgttgttggtaatctagatgaaattgctgtcacacgtcactgtaaaaattccgtccgatatatatatatatatatatatatatacgtgtgtgtgtgtgtgcgtgcgtgtgcgtgtgtgtaatacgaatccatttggctgataaaagttcagacgatcttactgcaggacgagcac

SEQ ID NO: 116297 - DNA, 440 bp, Physcomitrella patens
  Intron number 1 from transcript Pp1s78_180V6.1 (locus Pp1s 78_180V6) derived from phytozome v7.0 (chr-ID scaffold_78; pos 1165932 to 1166371 reverse strand)
gagcctcctttaacgtctgcagtgctcaagtagtgttcttcctccgccttctcctccatcaccaatccatttctgtgtttcaatttttttttttgctgctgtgggcacttgaacgagtgtactattttgtattattctttgcgattgtttgatattgttttggctggtgttgttcttggtgttatatcagaatattggaatcattttaatgaaaggtgtttctaattagcagactttgtagacgtcagagggttttagatgttttatcctctttttattgagttcagggtatgtgctattaaaccaatgatgttttgcaaacttattacacaaagcaggattttgaatcctttttaaatatcatcgtgcatcatgttttcaactattcttcacatgtgttgttagggtagcaaccccattggcgattgcaaaatttgtgg

SEQ ID NO: 116298 - DNA, 807 bp, Physcomitrella patens
  Intron number 1 from transcript Pp1s78_222V6.1 (locus Pp1s 78_222V6) derived from phytozome v7.0 (chr-ID scaffold_78; pos 1504435 to 1505241)
gtggtaagcaagccttctcgtcttgtttgacctcctgctgcaactcaaatcttcgcgattgctgaccatcctgaggggtctcggtttctttagattgtgaagctggtgtgattttgttttgttttgttttgtttgtttgtttgtttgtttgtttgtttttttttttttttttctcactgattccgtcttcgaactgggttgttgtggacaattccacaacgtttcaagttctcagccgggagttggtgcaatcgatgcagaaactcttctattgacaatgtcaagtttttgaagcaaacgtgatatttggtttcctccattttgtaatcctagccccatcgtagactttgtagtgaaggtgagtagagcgcaaactgaggaggtttcctgcaattcgtgaactagaattggaataaggatgactgctattcgaagaatttcgaggacaagaagcttggaaacatgagaaaatcaactctttgagttgcaacaatttgtgcagcgttcgctgttttgctctgttcaatttcttggaagacttttcagaaaagccctcaaacggattaactcaaatttgttatttctgaacttcgtttttgcaaagcagttcatatcagcatttgtagcatagatttcgtgaaggcgagatcttcatcaaacttgtgagcgacattcagcgggggggggtttggcagtccatacacatgcattacttccgatttgaggttcaaggcaaccgattggatgatacacaatgcctgatgtgtcaatggtgcagcagggactcaattatccggcaactcctga

SEQ ID NO: 116299 - DNA, 532 bp, Physcomitrella patens
  Intron number 1 from transcript Pp1s137_203V6.1 (locus Pp1 s137_203V6) derived from phytozome v7.0 (chr-ID scaffold_1 37; pos 704577 to 705108 reverse strand)
tgtccttgctgtcgatcgctgcggtggacaagagagtaagtttcctacgcatcgactgtaccgttttcccgcgaagaatagattgcttaactgattaataccagtatgaagcttttcgctgcatgattcacaattctctcataaacttcaggtttttttgactgaataccacactctataattcagctccagaacgtcgatgccagtttatctttgacctcaaataccatctggttttgaaaattggtgcttttgttgtcgacccctttgatcacgagtatccttctcagaaatttttgttgtgaagtaactaagtgtgctgcattagaagtccagtacaatcgatgcattgacgataataatcgatgctagacacgcaatcgggcacgaattattcaagatattaaacacagtttgctttaatctcactttggttttggataatggctaaagttttatgatgaactcttatttttgtattgattccttctcattgcttacgctcatttgtgacgcagaagcaacaccgaag

SEQ ID NO: 116300 - DNA, 1001 bp, Physcomitrella patens
  Intron number 1 from transcript Pp1s96_216V6.2 (locus Pp1s 96_216V6) derived from phytozome v7.0 (chr-ID scaffold_96; pos 1276710 to 1277710 reverse strand)
ctgcgatctgagattccaacttggaagggcctcgcgtaagaccggatctcgtttcttacgcttttgcgcctcgcgatatttgtacattgtttcctctggttttattcgattccgcctctgaaaatgtgaacgggctgcaagcttggttttggagcaacgttggagcattgaagggttgcgctcgtccctgcccattcctcgcttctgctctggcctatgtcatgacgacgtgaaggagaggatttgaggtgccgtaccttctaggtgtagtttgcgatgaaattttggatcacctgagcactaactcgtgaggtccgctttcaaagggatgtcttagagttatggtcttgcaagatttgttcttctctgaaatgtggggtcatttcttcgctgacgacgaatgtcggtatccttgggttgtgattttgagtactgtccacggtcacttatgacgctaggctccgcatccgtgcgattttccagcgagttctgatctatttccaaggacaaatgtctagataatgtaaacctgtcgctgctagcttctgggtcgactgtttttggtagtaagcccctcacaaaggtcatttctgctagaacaattggtattgcgatcttatttgaggaagtcatctatatgttttgatttgaaatgaattcaacagacattaggcgctctgctcctcaaccatcattgtagcccatctcagtccttcctgcccttacttgctttgtaaactctattcttaggctcaaggttcttgtatgttgagcatttgttcagtgccttctggtaacaaccatttatagtattctaatttcgctcaccatctgagtggttacagagataaacgccgcaagttgaataatgtttggttttcgaactgcattcatgtatcttagcattcattgacttgaacgttgatactctacagggttttgcaagtgatataatcctccccgaggagatttctgtgagttgattaacttggatcagcgac

SEQ ID NO: 116301 - DNA, 736 bp, Physcomitrella patens
  Intron number 2 from transcript Pp1s238_33V6.1 (locus Pp1s 238_33V6) derived from phytozome v7.0 (chr-ID scaffold_238 ; pos 391687 to 392422)
ggaggttgtgagccctgtcaccagcctctctcgctgtaagcattcttgctctgtgccatcaacttcgatatagatcgtcggaaggtattgtgatggtgagagaggatatcaaatgagcttgataatcgtggtgttggagcgtatgacattatggggctcgatgaaaattcgttgtttatctggatacagaagtgtcgattctgatgaggagaaccctaatctctcttctctctctctctctctctctctctctctctctctctctctcgctctcgcaaaatttcacgaagggaatggctgcatgtgtgacggaagtaaaaaatttatgcttagaaattcaatgcgctagtggtatctagttgaatcgagagactgtgtttagctttgtttttgaacgtcccttctttaattagattcacaatcatcttaactcgcatttttcgagaaagttgcaaatccgcgggcttttaatcgctgctcgtctggtgttttatatatttgttaagtattccgtatgcgtaatctacaagagattcttggagacctccttggttttaagcgctctagccagcagggttttacttcaaaataattgatttcggttgatttgttcttgaagtaagacggaattatgatagaataacagcatgttatgctatttaatttgatggtcatgttttttcaactgctcgtttgttcgctcttgcagtggcagaaggctattggctcaaagagt

SEQ ID NO: 116302 - DNA, 460 bp, Physcomitrella patens
  Intron number 1 from transcript Pp1s125_84V6.1 (locus Pp1s 125_84V6) derived from phytozome v7.0 (chr-ID scaffold_125 ; pos 665986 to 666445 reverse strand)
ggtaagtttcttttgttgtgactagtgaagtttttataactttttatgtaaattatgtctgttttcacaacttttatgtaaattttacaatttgttaccatatggcaatcctttgtcatcaacattattacatgaataaatttgattatgaattcatagcatgagtatctaatgtcaaattttgtttttagagacatgtattttatttttattatttattaaaggaatctggccatctgttatcgtgtaaatagatgaacagcattcattctggagcagcactgggagtagtagtattagtagtagtaggattcgttttcttcttgttatctcttctcttcccttactcacttactttgctgcaacggtaggtcaccccaacccagagtctctcacaactgcagtgttacattgttgacaattaggggacaaagtattcatccattcgaaccaacgacac

SEQ ID NO: 116303 - DNA, 729 bp, Physcomitrella patens
  Intron number 1 from transcript Pp1s54_196V6.1 (locus Pp1s 54_196V6) derived from phytozome v7.0 (chr-ID scaffold_54; pos 1195319 to 1196047 reverse strand)
gaacattgccttgcaccaccgattccgctgtggtggtactaatcctgctcttcttttcactaattttcggctctttatatatctgcttttggatcccttgctttgtgcattttttgccacatttttcgtagggtaatttaacatttgttgagtttttggatcgctgttacgaacttttgtgatgttgtggaatacgtcgacggtctgaagtttttcggcctggtttgtatcttctttggcggaactgtagttttaaggttgggcttgatggttttgataccaattttgagttggtttttgttggcgttgtaattggagacgtgggagcagtggtgaataggtcgtttcttgtagtatttttatggtaatgcgttcgttcgggagcgtgctgtgaattcttgaatgcgctcttggtgaattctcgagcactctcactgttggtttttcagcgtttcagttattggttgtagaatcgggtcttttttcactgggatatgggagcgaatgtgcagagtttcttccgattattctttttttgactcctagtattcttgacctgtacagccttgatcaaagtgaatatgaattcggcattgctgggtcaaatgcagctattttgacgtgctaaattccaaactgctataggttaggattggatctaattcgatggtatgttgcttgttattccgcctagggttttctcttgatcggggagtttttacttgagaa

SEQ ID NO: 116304 - DNA, 385 bp, Physcomitrella patens
  Intron number 3 from transcript Pp1s75_236V6.1 (locus Pp1s 75_236V6) derived from phytozome v7.0 (chr-ID scaffold_75; pos 1335837 to 1336221)
tgacgattattgggcctccagatactctctagtaagtagtattctgtttgtacaaatggggtgatgcttgtggatgcatgtggtcgtgttagctgattggtttagggtttgcctctgattactttatttttcgtatttggctctgttaatcagctcaacgatcaaacttcttcggcgtaaatctgattaatcttccagttttgtaaggaactcacgtgcagaaaatgtgcctgttgttggtgagaaaaccttgttgatacagtccatgtgtaatattgttcaacttctttgaaaattataaaacacattgtacacgttatgaagtttgtacttatgggggggatgactgtctgagtacagtgaaggaggctattttactgctatc

SEQ ID NO: 116305 - DNA, 901 bp, Physcomitrella patens
  Intron number 1 from transcript Pp1s63_54V6.1 (locus Pp1s6 3_54V6) derived from phytozome v7.0 (chr-ID scaffold_63; p os 596356 to 597256)
tgtctggttctgctccttcgtcaatcggttgctaggtgagattctctctgccttgtggtttcatatgtgctgtttgtcaactgtagtaggctgttgttgtgttgcatttgatgaatttctcttatgttgcacggttttgtatccggaagggggattgataagatttggggctttctctgagttgtttcttggcgccgaggaattagccaactagcggtggatgtatcggctcatgggtagtttgttggactgtttctcgtaactttgtgaggcattcgtgttttgattgtaactctagctgtccctccttgtcccacaggtgagatatagtcttgcgtgtatggaacgatttgcttcgctttgcagattgtgggcaatttgcttctgcatgcccgatgccagttatgtatgagttatgttggcctctgcgagtagcgtatttcttttcgatgtggatgatcctttctgtaattagaagctttcgctctagtttggtttgcgtttggtgttgtgcgatggcttgttgatagtgtcgattgtaactgtagattctacattaaatttacatagccaataatgcgcttaggcaagagaaagctttgtgcttgtcatccactgtgcggatagcatcactaacgattctgtttctcatggactagagaattgtgttagaaaacagaggtttacggatctatccctttacaggtatcaaatgttaagggacatctcgtcgcggtcgttgccgcgaactatgacaaaccgttgtcaatcctctatttttatttttgtttttatttttaaattttctgtgtttcacttcttttaccagattctcttgctcttaacaaagcatggtctcactgtgcagtcactgtctccagggacaatccattcttgagcc

SEQ ID NO: 116306 - DNA, 337 bp, Physcomitrella patens
  Intron number 2 from transcript Pp1s29_55V6.1 (locus Pp1s2 9_55V6) derived from phytozome v7.0 (chr-ID scaffold_29; p os 352279 to 352615)
gtactcacactaaacataaagtcatacttaccactgtaagcagcatctcttgtgcgctaggtttttttagctggttgttcctctcatggagtgccgccgccgattttgtcttttagggtgattttgaattggtcttagtcgagtggttggaagatggtcttctgattatatgaaatattttattttgtttcgttttagtttattttatttcattaattttgatgatgttttgaagtcttttatagttctaacagagattttctgctgagactaaatttttgttttgtggggtaattatgcagcctattgatagactcgggaaggcaggagagatagt

SEQ ID NO: 116307 - DNA, 821 bp, Physcomitrella patens
  Intron number 1 from transcript Pp1s92_8V6.2 (locus Pp1s92 _8V6) derived from phytozome v7.0 (chr-ID scaffold_92; pos 107557 to 108377 reverse strand)
gtacccgtgttttttatttctggcgcagccgcttctgatcgtggaataatggtttttcaatgtgtgccgaattttaattcctgttacctaacctaaagggtttcttttggatctactctcgtggtagtggtgtgttcagaaagtgtattgttgtcaggcggcgtgtcgctaacttgtcaatgttaacagattcaatccattgtgcgataagtggtatttctttgctcgaactgtttatacgagtgtatactacaggcatgattctaacaatttatttcgttatttttcgcgaaacctttgcggagttttctttttcgattcattcgagaaatgaatcctattttgattcccttttttaaatttcttttttcgttttttccccctatgtacgtaaatgctcattcccgcaccgaaaccctaattggaagaatcaccagtcacttagaaagaagaaattttaattatgtttttgccttcggacatctctaagttgattgggtactagtgattataccaaaccatgaaacttttaagccagttgtttgcagcagaaaggagaacaatctccttcctcctgacacggaaaagcactgaaggaaacccttgctagacgctcaatccgtgaatgtattgcacgaagataacttacgacaaagtcaaaactcaagtagattttgcgcctacatctaaaaccacaatccaaattcagtacttagaatactgactagaatctctttgcaacctttcattaagagttcaagtttaattcgcttagaatttacctaaattctggcaaacattattctgtacaggacaagacc

SEQ ID NO: 116308 - DNA, 796 bp, Physcomitrella patens
  Intron number 1 from transcript Pp1s57_85V6.1 (locus Pp1s5 7_85V6) derived from phytozome v7.0 (chr-ID scaffold_57; p os 572598 to 573393)
gtgttcctggcagacagtattcgcagagctttcaggtgcgttgatgaccttcgacaagggtctttcctaatttttcaaagatatgtctgctggagtctagtttttgtcctgagtagtgccttttacgttgaaattgaactgttgaagattagagtggctttgcttcgagaatatttctgtggacggtgctcaaatttcgcgaaccattacattattgatcaccttttgatagtgttgttaattgacgcagtttgttgttgaaagatgctatgtcgttgactcagagtgtctacaaatattggagagggtccctgtgcctgagagactagtgtgcatcggaagatttttagatgatcatgttccacccgctcctacttgttagtgtgtgggaaatcctttttcttgtttcttgcaaagatgggttgacattgaagttggttcttcaaataggatatacgcgtcagacgcttttacttgaagaaactatttcctattgtttaaacttagcagttaaattctcgaaaagacaacctcttctgtttaagagaaggcttttagaacattaaacactgctttccaaatctgcgatcgtatatgcagctgacaggcgccttgtgacgctccatcgcattctgtttgtttttcatttcatccagtatcaagtggcgcttggctccagcggtatttgacgtaatggggcagggtcttgagctgacagtccgaactgttccaatccagatcatcggtttgtacaagagttctgaagttttccttcggttttgttacagatccatta

SEQ ID NO: 116309 - DNA, 848 bp, Physcomitrella patens
  Intron number 1 from transcript Pp1s234_5V6.1 (locus Pp1s2 34_5V6) derived from phytozome v7.0 (chr-ID scaffold_234; pos 39478 to 40325)
cgcatttgtgggtttggtgtgttcaggccgtcgtgagtttgagttcgtgtttgcactcgagttttggtggatttactttggtgggttttttcagtttgagctggaaataaagtaggttatcactgggtttttttttgggaaattctacgtgggttgaatatatggctggattaaggggtaagtcggtggcagtggtttcgtagcgtaatcgtgattgcactcgagttttggtggatttactttggtgggttttttcagtttgagctggaaataaagtaagacatcactgggttttttttggggaaattctacgtggtttgaatatatggctggattaaggggtgagtcggtggcagtggtttcgtagcgtaatcgtgagttctgccgcatttggattgtagaggttgttcaagttatgtgcttctttgccttgcgtttattatttttttgttcgtttattgttgtggcagacccttatgtttttttaattttatttttacttgtctggttttttggattttcaactgggtttttgcgcttccctcttgatttcgagaccattacttgttttgcatttgaatggtcttctacttaccgaagagtagctgtgtggcagtgctgtaaagattacttcttacagcaggttgatgtggtcgtgatggatgtgtttggtttaatttcagttactgttcattttaacctatttcaaagtttgtccgcgtcttttttcatcttcttttcatgtcgtctcatctcctgctgtctcgtttgcactagagttagaaagctgaaaattggatgtgttacgctcagggtgacgctcctccacgccacaaaagcaggtattc

SEQ ID NO: 116310 - DNA, 526 bp, Physcomitrella patens
  Intron number 2 from transcript Pp1s31_248V6.2 (locus Pp1s 31_248V6) derived from phytozome v7.0 (chr-ID scaffold_31; pos 1348403 to 1348928 reverse strand)
tggctactcgtcggcctggaggcatcccccctgtggtaagactataagataaattgaattttctagtgtttgaggtcgaagaagaaattgaacaactgtctacggaaggttaagttagcacttgagtatgaattgatacttcggacaagcttgggattaatagtggttttctggttcagcatggttgaaacagagtttttaaaatatgtgcctctcttgcatatcaaatacacgctaactcgcatacagtttattcagtgtgtgtttacagaattttgattgcttttgcatgtgtgtgcggcgtttacttgtgggtctctacagtagtggcattctttgagcaagtgtgtatgtagtgttcgagaacggcagagtggtatttctgataacggttttgtttgattggattcagtatagagtcatcgtttcggtaccctcttttattctcctctgcacacttacatggaactcatctgttttgcgttgtgcagggggcaccagctctaaggggcgggttccctgtaga

SEQ ID NO: 116311 - DNA, 602 bp, Physcomitrella patens
  Intron number 1 from transcript Pp1s31_248V6.2 (locus Pp1s 31_248V6) derived from phytozome v7.0 (chr-ID scaffold_31; pos 1348997 to 1349598 reverse strand)
ttgttcactcacagcctgtgtgattactctaccaggtagtcctatcccgcacttgtgcttactgctcgttttgcgtatcattccgcttcgtcgggtttgtgctaagcgttcgagtttagccgcgagtttagtttagcgccatgctccctgtttcgttccactttagggttgccttcactccgattgcagacgtcgcacatctggtgcgatcaagggggtcgtggttttgaggtttgagcctcggttttctgtgcttgtgtgtttgttagtttgatagcccttggcgcagggggtttatgttaatgtaggtgtggtgtagtggtttgaggggtgccttacaggttagggtttgttaagtttgagggagtatacatgtagatggaagtggcgcggggcggggatacgaactgctaatttggatttttcagtagctgtagtacctttccgttggcctcatctgaactcgtgtaatgattttgaagcctttgtgttggaagatgatatgcctagggggatgagttctgtcgttccgttttgtgctaattatttttattcagttattttttcctccttactttctaaacattttaggtggagcgtgc

SEQ ID NO: 116312 - DNA, 1018 bp, Physcomitrella patens
  Intron number 1 from transcript Pp1s120_100V6.1 (locus Pp1 s120_100V6) derived from phytozome v7.0 (chr-ID scaffold_1 20; pos 664610 to 665627 reverse strand)
tgcccctccaagacctagcgattggaagctttgtggtgagtttttagagctctctcacagtggtgttgggtctaccggatttgacctcctccgaggggttggttgacagggttagaagtcaatgtaatttactggtcctttctgtggtgggttctcgttttggagtggtttggggctgtgtgtttggacgtggttgtggaagtgattctgtgtgtcgaggagagatgaatcggtgagtttgtcgtagctgaattggtagaatttagggcgtttttttattttgtggcttcctgttttctaacggccacgtttcgttttacttgcttttcccagaatgtgtaaagaagttccatgtatgtttgacactaaattgttgtgtttgctgctttcaaatgtgtgttacttggtctctattggagagattgatgaggtactaactggtgggaagtaactgacgaggatagagatagcaatgtgcatttatctgttgaaaaaattatgggtttactgaatgtggttctttgaggtggctgtttgggctcaattatgtacatggttgtgtgattagttgatttaaagatcattgcttggtttggtgaacgtggcggtgtacaattttctgaaggttcctgtgtctcatttctgtgctgtaatgagtgatgttggttccgccatattgctgtttgttgttctgtctcgcaagggtcaattgatgaacatgtttatgatggcttcattgataggttcttcgtgttgctggaatcgtctttaatttctaaatatattcatgaaatgtgagttcagtggcgtacgacacatattgtgattaagttttgtactgaggacgtagacaaatattggttatggttattatcgtctttctttgcaactcttcattttcgcacacccttttacgtcgtcacattacgtgtacctcatctgttcgccttgtgtattgcggttcaattttcttaagctgactatcgtttgattggggaattttggtgtgcagattccc

SEQ ID NO: 116313 - DNA, 813 bp, Physcomitrella patens
  Intron number 1 from transcript Pp1s81_205V6.1 (locus Pp1s 81_205V6) derived from phytozome v7.0 (chr-ID scaffold_81; pos 1208191 to 1209003 reverse strand)
aagcatttgcgcgacgcaatgcagtcagcaggctgaagtgttggtcggtcccctatacaccattttataacttctaaagatggcacggtacaggtgcttccattacttttggacttgcacagagggcatagctttgtgaatttctggtaccgtttatgcaacgggctccgcttgaatgaggcagagcttcaacttatcttgcttctcacttccatcggttgcataggacgtgttcagtctttgattctgtgtgtctcgtgtaattgactgcttattcttgtaaaattttggacctttttaggtaattatcgaaaaatgaaccgacttgttcatttcactgtcacaggtattgctgagcctggaagatgatagacttgtcgaagctgttggtatcccggtgacgtataggaaaggagggtcaaggctgactgactgtgtgtaatcacaggtctgaatctattttctcatcttggattgtccttttcccgattgcgctttaaaatccactatttgaatcaaacggtgtacttagctgtaatgcactctgtaacttatgaagctcgaatctagagattgtatgtaatgagagtaggttaagataatgtttatggtgttgtaccaatcagatgttgctgtgtttttctcttttgtttacaagaactgcaaaagtaaaaatgctgagtatagtaatctttaatagctgcagtcttctttgtagctagttccttagtttttgattgcatgcactcaaacgattatgtgtaaactttctgtgcaggttggctgcgcactgaattgtacattttgttgcac

SEQ ID NO: 116314 - DNA, 835 bp, Physcomitrella patens
  Intron number 1 from transcript Pp1s57_97V6.1 (locus Pp1s5 7_97V6) derived from phytozome v7.0 (chr-ID scaffold_57; p os 691642 to 692476)
tagtggtaagattcattgccaagttgtggttgattttggtgtggtcttgtttccggaaataaataatttgtaacacttgtattcattgtgtctttcctgtttgtcggtgttggtttggtagtgttagggttttccagtgttggagggtatcgcttttgcacatggttttcggtctgaattggtgttttggtcggaatactcggcaaaaggagcagggcgaggtattaggcaggagatgtcttcggcttttgcttgttagggacatttcttaatccttttcgttgacgtttcagtgcgtgtttctcatgaaggttttgactttggtatggtggatttttgaactcggacatcaccttcccttggcactttctgttttcaatttcgcgatatgcgtttcgaatagttaaatttgcccgactgtcgtcaaatctttaagtacgaatgaatctatatctaccgaattaacaactactgcagaagcttcaagcgacacgcacacaatgtggctgttttaagcagctgctcttttcctatcgaggaaatgccaacaaatactccacaagtgcagcgcactagaacacgcgcatacggtctctgggaaccgaatctcagcattggacttgctttgaagagaaagtctttttgagttttaaaatacgtggatttgttccaccttactcagtccagaccatcgactgtatactacacgccagttcaaaaccaggacgtcaattaagagaaatatctctgttgcagacttttggtgttctttaccaaaggttcactgtttacggaataattacaatagtgtcaaatgtggtttgttcaggtggag

SEQ ID NO: 116315 - DNA, 492 bp, Physcomitrella patens
  Intron number 1 from transcript Pp1s13_291V6.3 (locus Pp1s 13_291V6) derived from phytozome v7.0 (chr-ID scaffold_13; pos 1915884 to 1916375)
cccctgttatcaggtactgagtaatatcgttgcgtttttttcttgttgggttgcgtgacggtttggtcggtagagggtaatgacatcgggttttggtgcgcgcagtgtaggtcgagcctctctctgcctttttttgtctttttgagaaagggtgtagctcttggggtggcttgggttgtgatgagttcaatcaggttaagaatttttctacgagagtgctgggtccttcgtggctgtaatttgtgtattgtctatgattattacacgtggttgaagctggatcctacctgcagaggaagctgtccttaagtacggaagaattcgtggtgttctgtgggagccggtaatgtgtagtggtgtttcgcttgacaccatgggaagctgtcaagctggtcggttgcttggattgtcggtctgcgtgttttcatgcactcacgaacttttttttggctttgatttagaatcagcagatctgcagtgtgagacgaacgc

SEQ ID NO: 116316 - DNA, 442 bp, Physcomitrella patens
  Intron number 1 from transcript Pp1s40_54V6.1 (locus Pp1s4 0_54V6) derived from phytozome v7.0 (chr-ID scaffold_40; p os 426610 to 427051)
gcgagctactgaatctgtcctccagcgctctcctggtaatctttaaaaccataagaacaagctgaactgagtgaggggtacatgaatgagtcattgttactgtgtaattcacctacacttggaccagaatagtttgctaggtttgcttcaaaaatgtaattttcacactcgttagacacaatgaaacacgtttgggtactacttcaatcacgtttaattgtttcacaaagtcttctgacatttcatacccttttgattcgaacacaatacaggcgaaaaaacggaataaatgaatctaaactacttgcgtagcatctctgagtctaataattccgtcttttgggttcatcttttgcgcgcgtttacccaactctcaccaactaaacagttttggctttcttcaccaggtagcggatcttacagtattgtaactgaaccctcg

SEQ ID NO: 116317 - DNA, 546 bp, Physcomitrella patens
  Intron number 1 from transcript Pp1s14_321V6.1 (locus Pp1s 14_321V6) derived from phytozome v7.0 (chr-ID scaffold_14; pos 1951943 to 1952488 reverse strand)
ccacggccagtaaattgtgggtttcatgatccctatttagggttcccccccttttgctactttgttttttaattctgtctttcacttgattcttctgattttattctagctcgtaatttaattttcctcaattgtgtcgttggcatgattttgagatttgaggatgggtttgttatttatttctgctttttccggttgttttgcgtgagtgttggtatagaaaattaattctgaagtagttcagtgtatgtgattgagatgggcgtatccatgggtgtattgaatcggccgaatggttcaattcttttcatcagcagtttatatgatttcttttgtcatggcaactcacattctcgtgatgttagttgagtctgactttactgtacttgcagtgacaacacgtactgtggtctttagagaatttgtggttttatacgtactgtctctacccttaaggtttacatgtagaatgcggcaatgcgtccatcgtgatccgcgtcatctaacaaatctttgaaatccgtgcaattgtggttggtgtaggtc

SEQ ID NO: 116318 - DNA, 280 bp, Physcomitrella patens
  Intron number 2 from transcript Pp1s274_2V6.1 (locus Pp1s2 74_2V6) derived from phytozome v7.0 (chr-ID scaffold_274; pos 10894 to 11173 reverse strand)
gctctcgtttcgtcgcagtggctttagcgtctcaggtaatagggattttactaatatttatatttttgattttgtcattgcaattgacgtttctgtcgtttgtgtaacgttagctactccttgttttgttgtttaccattagtactactttttagctggtgtagagtggcataagtggcattacggttttcttttcaaactttgcaattttcctggatacaaagttgtaagtcgcgtccttttttgttgaatgttgttacagttgaggactcttttactg

SEQ ID NO: 116319 - DNA, 413 bp, Physcomitrella patens
  Intron number 2 from transcript Pp1s40_208V6.1 (locus Pp1s 40_208V6) derived from phytozome v7.0 (chr-ID scaffold_40; pos 1522359 to 1522771 reverse strand)
aatctctagaggaattgaaggtgaaggcttccctgcagcaactgctgaatctaatattaatatactaagtccatccttgtgatttgcatagcagtctgccttatgtatttgaatgagttgctacagggatcatgttccagaattattggtactgagggagggccctaaacctgtacttttccattgtgtatgcaataattaaggttgacaaagttagggttcatttatatcttgtcaatgtgagaatattcttcgcttgtgttgatatcctatgttgtctttgagttttttttttctttgctgttaggttgtgtatgcagttctgagttgatcacctcattggctctatgcagctggtctgcatcgaatttctagttgctctccctcatcgtatggtaattgcgtgcaggccg

SEQ ID NO: 116320 - DNA, 827 bp, Physcomitrella patens
  Intron number 1 from transcript Pp1s281_121V6.1 (locus Pp1 s281_121V6) derived from phytozome v7.0 (chr-ID scaffold_2 81; pos 567627 to 568453 reverse strand)
acgatctgctgagggttgttcggaattctgagaaggtgagtaacatcgttcatctaaaaccaaaatatatttaaattaggatctaaatttcgtcgataaaatgagttctgtcaatatttagcaatgtttttctacatcactctgtagacgcgttcactcttcactcttccttcagatgcgttccaataaaacctgtacaactaagtcgctgttgtttacttggtcatgttaagtggttaaaggaatttctacatcacttatcagaggatgtaatgaactaactactgttggcgaaatataactttgacagcatgcttgattcatttcttatagtaccagccgtttattgtgcatcaacaaacttaagttatgatttgagctagaattccatgtcctatgtgttactatgacctgcagtcctgttcctctttcacttcacagcagcaagctacctcactgttagcttaacagtatgcactgggttcagcagaaaaccccagtgtgtcggccgaaagcatttggaactttgcttcatcaatcacagcgaagaccaattcttcgaaataagcatttatcctcgaagttcgacagaagatgcgaggtcagaatacgactccatcgtgcttaaagccattcttaacatggcatcaaatgtcaataggaacatagccctagtcctcttttttataacactggtatctacttttacctcaccgttcatagccttgctatcattaaccactgcgcaatccttgatttgcatcaaaatcctgaccgtcgatctttcctgcacacgtgttgcagctcgacttacttccagatattaa

SEQ ID NO: 116321 - DNA, 794 bp, Physcomitrella patens
  Intron number 1 from transcript Pp1s172_4V6.3 (locus Pp1s1 72_4V6) derived from phytozome v7.0 (chr-ID scaffold_172; pos 15392 to 16185 reverse strand)
gcttgctggacttccccctttgacactgcgattgtgtaagatccgcgattcttaccgctggaagaatagcgatgccgggacgagagcttatttctggcgtttttcctgttcttcgtctctgtcgaacatcttcatcgtcacgtctcaagtccctggttctacttgtttcttccgatacacacaataatgctcttacatgaatgcctgatggaaggggagaggtcgaggctggcaaagagaatgagatttgcaaacacctctggtgtggactttcccagccacaaagttttgtttggattaggtcaatgtgttacagatttttttgtcaggagtcggaattagtcgctggaaatggcagctgagttttcaccttgtagatacttatttgatcttctactggataaacagcccattctcaaaaggtctgtaggtagagagttgggcaagtctgcttaatacgcgcttcctctttctaaaatgagtataggacataaacgaggttgtaacgcaaccgtacctcaatgtgttatcctcatcaattttcacaccttttcaacccgctttgggctttgtacaattgacgtctcagaaacctgaacgtcttgcaatggttatcttgtcaatgccgctaggagagtcgttcatgcatgtcagcgtccaggatctccttttgatgttgaattcttttagtgtttcagcgtttccgtaagagaattgtagtttagcatgcggcacagaaggtgataatcattgttgcaggtcacctatcaagtgggcgtggctgttacactatc

SEQ ID NO: 116322 - DNA, 816 bp, Physcomitrella patens
  Intron number 2 from transcript Pp1s43_252V6.2 (locus Pp1s 43_252V6) derived from phytozome v7.0 (chr-ID scaffold_43; pos 2019473 to 2020288)
tgtttcggaaaatcaagaccaggtcggaaaacaaggtaagacgctggttcttagcttacacttgacttttgctgtgttttgaacttatgtcgtttgtcattttacagtagttaatttttgcgcaattcacatccaacccgaggcgcacgctagatggtcttggtttgcagcatttatgttgctcacacgcgtaactttggcactccaacttgtgttgatattttcatctttcaattcactcgagtgtggtatgatttaaaattaaaatttatgctttctttagttctttcattctccgatttagctctaaaggcttagtatttgattgttatgacaaattatcacgatttaatcaacatttttcattccactttttcggcactgtacaattttttcctactggcatcaatgtgcctctccgcacatagcaaggtagaaggttttcatcgcacagtacacgaccgaggatttacgatggttgactgattgtaaatctaaacccaatggccccatatgaatcagctgataccgatcttaaatgacgtgaatattgtagcgatcagcattcaggaatttctatagctagcactaaattcagtgcgtatgtattgatatccttccttcataatctccttgagtatgctatgtggcatttatatttttaatagtgttttagcgttcgaaagttttcgaatttgaatatgaagatgaaggcatttcgtttgtggcttaccgatgcaggtatttgaggcagggtttggttgtggaatgtgattagatgtccctcctgctttacaagaaactggttggatgcag

SEQ ID NO: 116323 - DNA, 465 bp, Physcomitrella patens
  Intron number 2 from transcript Pp1s154_140V6.1 (locus Pp1 s154_140V6) derived from phytozome v7.0 (chr-ID scaffold_1 54; pos 935348 to 935812 reverse strand)
ttctttggattctcagatattactgccttgcataggtacggaacagcatgaatcttcgttgttttgttttactgccttcgtgtttctccacctcgttctcaactcaaatcatataggtgtgacgttgttaggtttcgctacgggcgactcgagatttaactgcaatttcttcaaatacttcattaatacatgcgtttaaaacatcacgaaatgaaaattgttggttttgtttctgttctcgtgactgttttctacatcaatgatgagtccaaccactgactatcctgaaccttcattgttattattataatcattattgctcttatgttttctcatcgctgttctaattgattttggaaattgtgcttcttctactagcgaggaaatgggcattttgcatatttcccacgtgcttcagtagaaaagcgtcctattcataattaatgtgaagttgtttgcagcttg

SEQ ID NO: 116324 - DNA, 449 bp, Physcomitrella patens
  Intron number 5 from transcript Pp1s14_250V6.1 (locus Pp1s 14_250V6) derived from phytozome v7.0 (chr-ID scaffold_14; pos 1523576 to 1524024 reverse strand)
ggctgctccaactgttactagcaacggaaaaagaggtacgtaaaattttatgatgatcggagttctcatgtgaaccgggtgtttattcaagacagtgcgtataagaatcatggttatggtggtgagtctgttttttgtttttcttcccataatttacattgtgatatacgttacgtatatatgtgactcttaatttgtctttcctgaaagatcattattacgtcggtttacttcgatattttaagttttagttgaactttctcttgattctatactttcgtaagacaagcaactactttgtttcaataggattagggcttcttgaagtatttttttggtttacttactctgaagaaggagcgaaacaatcaacatattgcatttagttttctaagttttcaatcgaaaatacagctcctgaagcagacacacaatctgaaggccctgga

SEQ ID NO: 116325 - DNA, 447 bp, Physcomitrella patens
  Intron number 1 from transcript Pp1s29_109V6.1 (locus Pp1s 29_109V6) derived from phytozome v7.0 (chr-ID scaffold_29; pos 723239 to 723685 reverse strand)
gttgaatatcttgtaagttaaataaaaactcttttgttgtgtttgtttttgccaaaatgatttgcagaggattaaggctttaactcttcttccttttttcttttttttcttgttaatgtttatatgggattatagctccaattgatatttcagttgtttatattctttgtacatataatttagaaagataatggaagtatcaacctccgtgattatttgtaatctgttgcttgttaattttggggcttcataaaccatcattctttagatttgaatgattttattttttatttttttatcacaaagtaattatagctcaatacttgatttttttttatcataaaggtgaagtttttcatcattgacaaggatacttttgttttgttttgtttagttttttttttaatgtttgtttcttcttttttgaaaaaaatagaaaaaaggaga

SEQ ID NO: 116326 - DNA, 738 bp, Physcomitrella patens
  Intron number 1 from transcript Pp1s229_47V6.2 (locus Pp1s 229_47V6) derived from phytozome v7.0 (chr-ID scaffold_229 ; pos 567886 to 568623)
ctcgaacgagtatgagcttaccttcttcttctacttcttctcggtggaattgacttttattctgctttttaattttattttttcctaaaattgtatgtttcaacatgtaaccttgggctgttgcagcagaaaaaaaacaattataaaccatacttcactgttgattttacgaaagtgtatcttcggaaaaacttgatctgtctttggtgaactgcgaggtcaccgtcagtattgatattagcactgttgaacagtgggccggcgtcatagtatactcacattcaagtccaccagactattactgctcgatcacacctcttccagatgctctagctttgagaatgtatttgtgattgaatcgaaaggatttgacattcaatcacgatgtccttaggacaacactgagtagcactggagatgccgtgattgcagcaccaaatgtctggttctacttttgattgatgtcagaaaatgattgagtcaagggcagcaccttgaaaatgaaagagaagtgaaagtgttaaagaaagaatcaaattggtctcttccaagttctacagctttggtggacgtcgaatttttgggtgctcagattctttgaggctttcagttccttgaatgattatttggctgtgttgtgtgaagtaactgtttcatgtgggccggttcgttgtgataattgtgagtctgcaacattgttcaggataaaatctcgtcattttgggaggttaagaaaga

SEQ ID NO: 116327 - DNA, 966 bp, Physcomitrella patens
  Intron number 1 from transcript Pp1s25_218V6.1 (locus Pp1s 25_218V6) derived from phytozome v7.0 (chr-ID scaffold_25; pos 1403630 to 1404595)
cggcgagttcctttgttcctgtacttagtcatcgccacttgtattctctctctgtgcaaaaacaaatgtttgattcgtgggctttcgtcgtaccataccctacttcagaattttttcctgtatgtattggtggaggttttcaactattctttctccagtcacattactgcggtataggaaagggtcatcatcgttctcggagtctttgcggccaggtgactgcgtttatgagcaatgtttacttgctgattgaatttatgggggttgtcggtggatgagtggtgggattgcaactggatcgatgtttcgtttgagctgagatttgagtcggattgcagtcagaggatgattgaggatcatgatttgcctgttctgggaattgatttcgcttgtcgattttttggggttaaaggtggcgggcgtttgtgtttgatgtggctatgtcacaattatcttcaactgtttcttcttggtttagtttgtcgtacgatgtacaaggagtatttgaaggattcggtgttgagtggaaggtgaagcactggtataaagagtgaagttcgagggtcgttggggcaggatttcttcctgctttcagagtcagttaacctgagggcctgaaattcagttggacacctgtgaacaatgcttgcgaacgtagttgtaaacaactggttttcacattatatctatcgttgctttttctccttaggccattgctaaggtatcgacctagatttctttccgccatgctagaaattctttgagggaaacaaattttcaagagatcgcacgcttttgtagactgtccacgcagagcttgagaaagaagcagcctagattaacgtgggaataaccctgttattatagcaggatgattatgtgtatgtaaaaaaaactccgtccggttgaattcctcagacatcagaactgatcagtacaaggtcatggtgacgaactgcaggaaaa

SEQ ID NO: 116328 - DNA, 1009 bp, Physcomitrella patens
  Intron number 1 from transcript Pp1s34_302V6.1 (locus Pp1s 34_302V6) derived from phytozome v7.0 (chr-ID scaffold_34; pos 1544772 to 1545780)
cagcgcgggtgaggctggcgttgcggttttgatggcgttcctttgtgtgtgtgtgtgtgcgtgtgcgtgtgaacatttgtgtacaagttagtttgtttacttgagtatagattggagtttgtggcggtggccgtagcgatgacagtggttgcccttgggcatttctgtcaacgttgtttgagctgtctgaaagttgttgaaagctatgtcttcttgtttccgagttgcgttgttgtggagttagaggttggaaattcgaggtctatttggcgtttcaaacaagttcttgatgtggattgtgatctgtcggaccttcatgttcaagtgtgggcgtactttgttttgggtttttttaagttacccatgcgtttggtctcttttgcagcagaagctccacggggcacatgcttttatgttgtcacgtgcaacatgttaatcgattatcttcagcagttttgttgaacatgtagatttgctggatcttttttctatagaaatcgagagtgttgtggttcttcgaaatttgttttagacacattcgaagttgttggttcatgctgtatagtaatcgggagaattcttagggctggaagtagtggaggcacagaaacttaatgtgcactgctcgtaggttggaacttctacccttttcctgtaaagggcaggtgtttgtgaagtcagcccgaattacagtaggaacgttgagcagcacggattttttctgccttggcgatgtccatccattttgatagtgtagaagagctacacagtcggagttgttcatgtgaatgactcgagatccatcatttacatgaaatatctcatgttctttaggtcttcagatttttatcaattgagctcggaaatgtcacgagagtaagagtcgaaggtcggtttgtcagagatggactgcagttttacttctgaatgatacttattatgatatatcgtgaccgttgtcttactagctggttgctgttgatgtacaccaggacctgtggcagaagat

SEQ ID NO: 116329 - DNA, 492 bp, Physcomitrella patens
  Intron number 1 from transcript Pp1s188_1V6.2 (locus Pp1s1 88_1V6) derived from phytozome v7.0 (chr-ID scaffold_188; pos 40314 to 40805)
atatagctctgcttctgtatatataaggtttgttgcatctcctggatgtgttgatggtcgcagttctgtttttgattgctcttgagtcttttgttagactggttacgggtaaattggtgaagtgaagagaaattggtggtgtaccactgtaacagttatttcaatcactgctgcactttgaagtcttgtttgtgcattttatcttgcactgattgagttttaggaagctagttttgttcgcagatatgatgattacaatgatgataactttgatttagtgtaataaattgttattatttacaattatgatttttttgttatgttttactcaattgtattgttgcactcatttaagtttcaagaaaaagcaatatgcatcatatcacgtctattctaccttgatcagtgtgatatttcaacactgatgctccttgagattgtagagatgatgagtgtggtgtacgactgctgttatccgcagaagagcaaacc

SEQ ID NO: 116330 - DNA, 544 bp, Physcomitrella patens
  Intron number 2 from transcript Pp1s198_147V6.1 (locus Pp1 s198_147V6) derived from phytozome v7.0 (chr-ID scaffold_1 98; pos 689929 to 690472)
ccaacaagcttcagaagctcgcaaacaaggtaatatcactgatccacctttctcgttctttttctttaattaagaaccgcagtttctattctgacgctcacattggatacaatgctcgtctaaaacgcacttatcttaactgtcgaatctatcagtgtgaaaggtctaggtgtgcatcaatctttttcgttcattgttctctaaacgaagacattacgaagacatcgttcttatgaatcaaattttttgttgctcgttgttgctggttacttcgattagcgatttatctcagataagtaggtaatttgcattttgacttaagaagttgtggggtttctacgattcgataattatctttctaaacatctttccttcacatgcgagtttgtaacattagcactcgctaattttttcatgtcgtgaaacaaactttctgaaccttttctttgatcatagtcggtttaagattagaaagcttactctatggtttaatttgtggagatgtgcagtgcaatttttctctaggcgaggttctgcgcaaata

SEQ ID NO: 116331 - DNA, 975 bp, Physcomitrella patens
  Intron number 1 from transcript Pp1s43_18V6.1 (locus Pp1s4 3_18V6) derived from phytozome v7.0 (chr-ID scaffold_43; p os 137102 to 138076)
tatccaagggactgttgtctaagaacacttgcgaggtgcggcaatcgaaactcttgaatgctgcatgattagattatagtttttgcttgcacagcactgtacatgcttgtagactgtctgtatgaatttcgttttaaggggattatttttgggggaatatttgtcatgtgaagttcaataattgtgaatattttttgcaaagaaataaaataagatttgctcgccaccaatacacattgatttgaatcagtgtgaggggagaattttgggaagagttggctctctctctctctctctctctatatatatatatatatatatatatatatataaaaaattaactctaattttacctaagacaattttctgaaactgagttcgaattattcctacagtttcgaatttgagtcgttaatttgggtgttccactgggttgatctgcaactaaagtccggtttgggcggacgctcgtttgcagtgttcttcacttgggtagtggataatgatgtctgagatttttagaggtttgttgctttgagcttatattgtgttttccgatgtacatatatatgcacataattttcagttctcattaccgaaattttcagccgagggaatgcttcttgggaggatcttgctttgattttatttattcaatagaggatttgtgttggtgaatagctgtgtatatgactatcttaaacacgtgacgtgctccatgtagtaaactatacttgacttagtgactctggaccctcttattgtgattggttctgagtcattgggggatttttatgacgcaatctctattgtggatatcaactccacttgtgagcagatatcgttggtttatgtggtgcttgttctcacaggacttggaattttcacatggaacttgtctagtgcacaattgaacggagtttgtggatgggtttgttaggtggttgacacacaagggctgttgctgccaagcat

SEQ ID NO: 116332 - DNA, 847 bp, Physcomitrella patens
  Intron number 1 from transcript Pp1s10_408V6.1 (locus Pp1s 10_408V6) derived from phytozome v7.0 (chr-ID scaffold_10; pos 3163383 to 3164229)
tggatttgggattgctatctctggtacggagcctgaccgaacgtaaccacttgactgagcgcagactgtctgttgaataccttaattcagacgtttttttggaatctccttcccaacgtgcaatttttgaaatgaatatttgattgcgttaggagatgtcaatcatcgaatcgttgtgaaactctggagacaggattttcttaagtgggatgaattagaaataggcgttaagcttctactactctaaaattggtcttgtagtgctagggcagttgacaacacctggttaaaaatttcgcgtgaatcgttgatataccccacacgctgccaatctttttcaaatcgctagatagaaagagattgattctaagaatgtcaggcctgattgcgaaacataggctttgttctgaaaataattaagaagatgtggagtttgactttaagacttgttcgaagaaattaaatcaactgatagaagtaatgcctattaggcgccaactaagcgttaagtttacacatgtaatgaagggacatctcaggtcatcatgtttgtagttggagtcagatcaagatattttcgataagtaattcaaaaaatgcgaagcgcactcagtgaactggttgttcaatcttcgttgtcgaggagctatcagaagacttgaggagctcggattcattttgatggtgtttttgtagtttagtccaggggtgaccaaagaaattcaatatgaattcgatgtgaaggaagtgaaggttgtttcaaacgttgaactgatagcattctaaacacgattgaattcgtgattgctgttggtgttttacatgcagagtccggtaagctcaatac

SEQ ID NO: 116333 - DNA, 641 bp, Physcomitrella patens
  Intron number 1 from transcript Pp1s52_233V6.4 (locus Pp1s 52_233V6) derived from phytozome v7.0 (chr-ID scaffold_52; pos 1826577 to 1827217 reverse strand)
tgggaatttcggtgttgattttcttcaaatttcaggttaaaatcttctttgtgttttcttttttttcttttctggcgagagtcgagttgcggatgttgggcgtggaattgatttttgctttggaaccgagtttttgttttagttttggtttgctgggctgcgaggaggggaattttttgcttggtttttgtttgtggggattttagggattaatggttgagtagagtatgtaatcatggtgtttcatagtagtgcttggaccgtctaatacccgccggaattagttgaagcgtggttcggttctctaacgaaaattatgactgcatgcatcatcagggttagagggctctcggagttgcaagcagcagaagttctttacttttttttttactgattttcttatttccgaccctatcgaagtgagttatactaggagttttatttttcaagtttttatttttaataattcctgcagtattcttccctccagcagtgtgttacagcggtggaattcaaatttttaggcttattatctgagtggtattgattgaaatattttggctcagttgactgtgaggatttggattgcgtgaaatttagatttaaggcgtacagtgttggcttgtagcagattttcaaac

SEQ ID NO: 116334 - DNA, 914 bp, Physcomitrella patens
  Intron number 1 from transcript Pp1s376_53V6.1 (locus Pp1s 376_53V6) derived from phytozome v7.0 (chr-ID scaffold_376 ; pos 316802 to 317715)
ttctctaccttaccctcgctcgctcactttctcaggtacgtttcgatcctcagttcctaatttttctttactcgtgcctcgtgaagttcgtgcaaacacagcggccaggagaagctagttcgcgggaaaagggttgccagggactttgcgttagcgatcggtttttttgttgtgtagttcctgatggctggaaattcaattcatcgaattttcattagctttatctttttcgttagtggaattgcttgctggagttcatgttgaatttgccagcttgtgtatgtttcaatgctcaggcgcgaccgatcgggacttggtgtttgattccggggtttgagtagttgcttattgtgaaatgtgccctggggtattttcgtgcctattacagagacattcgttgcagtttaacctagaagagtcttggggggtgagttggatctggggtttgttcatcagttggaatggggaagaattagcttcgtgactgctcaatgtctaggtgaaatgtgtagataggtaattacttaaactttgatgcactcttctatgagtcttttaggcagggatccagtgtgtttctttaacagaagtttgacactgatatttgagggcgaccgatgtgttcagcgaaaatttgacatgtccgttttgtcaatgccgtaatcgtatcgaaataaggatattcagaaatcatgaattcgacgaactgatctgtctctgactttcttacaagctatcttatttatcattagtgagaggactgaattattctctaagtcttgtatagatgcaacgaccatttctgtttttggatttggttgttcgtattgttgtttcattactttacatgcttccgctgatttcacgtgaccctcacagaattatctgagcggtgaagtcttcgagtattcaag

SEQ ID NO: 116335 - DNA, 607 bp, Physcomitrella patens
  Intron number 2 from transcript Pp1s376_53V6.1 (locus Pp1s 376_53V6) derived from phytozome v7.0 (chr-ID scaffold_376 ; pos 318074 to 318680)
tcacatcaccacgttttcctcgtgctcatatcctggtgcgtattttaatggttcatgccgttcgataaaagcgggcagttagattttgtctatgattttcaaacagacgtctcattgtcaacagttgggaatctatttctttttaaagtatttgacagtatagcaggatttagagcacattacagcgaccttgtaggtaccttgttaacgatatttgagacttgaaaagaaaaagtgctgcgcagaaatgtatcgaccactgtatttgtaattatatctggagacagatgatggggtttccacatgctggaatattcccccccctttgttttgtttctttctcgcacatttaaagggtagttaacatgtagtatcgatgctttgcgtttagtccggcatcctttaaacaccataaataatatcactcgagagagtaattttagaaacttatttgattctttttgaagagtgtttctatgagcgtcaaaaatttgctttcgaaagcgagctgccgttcaatcgaatagacttgtttcgaagctgttatcttactctcgttttgcttgctccaggatcgaaaacctcgtggagcaagttttgctcacag

SEQ ID NO: 116336 - DNA, 306 bp, Physcomitrella patens
  Intron number 1 from transcript Pp1s399_34V6.1 (locus Pp1s 399_34V6) derived from phytozome v7.0 (chr-ID scaffold_399 ; pos 305552 to 305857)
tgagaatcttattgtggatcctaatcaccgtagtggtaaccacttctcctcttccttagttctggcatcatttttccgatgctacgttctttattatctgtctgatacttgtttcttttaaaatagggtttggttctaaatgtctgtagcctgaactacgtatcatcttttcattaaggaattgtctctgggaataagcagttcaaaagttatacaagttttgtgcagtgacgttgtttgagttctttatgtgctgatattattgcctggattacgcaggttacgttgctcttgtaggaaaaccaa

SEQ ID NO: 116337 - DNA, 830 bp, Physcomitrella patens
  Intron number 1 from transcript Pp1s88_64V6.1 (locus Pp1s8 8_64V6) derived from phytozome v7.0 (chr-ID scaffold_88; p os 477597 to 478426)
agcgctttctctcgctattgtcttctaggaaagaggtatgttccttgctttacttcttgtgtgccctctctttacttcctgttttgtatttcttatcgctcactggacctgtaatctgacaaccgtgtcgttggttctatctgcgaagtcacaataagggatgcatgtcttgacgtcttgctcctcactaaattgatatcggttttgcgtgttccttgaagtatcagatgtgatcaaaaggaaactcacataccgtttgcatattatttggttatttgaatgcaacattagctggtttaagtatttaaagttctcccatacacgatctctaattacgtggacaggttggactgtttttaaactgaacgtaaaagaaatttttgtgaactttcgcagtattccctcgctggagaaagatccctaattattgaacacacgcctgggctgttatcatttttccatgagctcacttaacgagtcactcgtggcagaatttccgacaccactatttcacttgtctttcttagcgatactgtcactaaagctctctttgaatatgtttgttggttttaagaaagggggatatggtgacagtattcctgccttcttatataatttctgcctaatttcttcagattctctttaaaaataactattgggctagaagaacggagaaattcctaattgcggaaatctgcaaacatgggttagttgaaagcggtgcttcgattttttttgactgaaacatatggcaagatggcataaatagttgtgtactttaatgcgggttctgacgcatctcttgttttttgcaggcttctcccgagact

SEQ ID NO: 116338 - DNA, 913 bp, Physcomitrella patens
  Intron number 1 from transcript Pp1s125_6V6.1 (locus Pp1s1 25_6V6) derived from phytozome v7.0 (chr-ID scaffold_125; pos 110248 to 111160)
ccttgatctggttaccgctgcgcagaagagctgtagcattgtagagccagtagtacaacttgtgctgggaagctgtttgatggtgaagtttgaaaatagattccttgaacaatgagaacgccgttggctgattctcggcagctgaaaataatgtcctatcttagttagttgcaagaccacttgttgtagcaatctcaaaaggacgtggagatacctgcggtcagaagactggcagagaaggaacacacctgactgggtcgatctatcttgatgcattcggatcaggtagcctccctcgtgtaccaatgtacagctagctcaggtcagatttgttagtctaaatctatttggccgtcgttagctccccactcatgcctagctacatgttctgagaaaacagaatctggacagattatcaaaatttgcgaccggattaattggtcgacgtctgttggagattgccgcaagctttcatagtcttacaaaaattcttactctacccgggttagatgagtgatagttttagctcgatggaaggaaggcatccttatggtctgtcagtttataaactagttttgttgtgaaaggatttattgtcagatatcattctgtggcccttataatagcatagtaacgacacgggaattggaacttggttcagcatgaattcaagtcgttaacttcattggttaaatttttaaggtcgcatgaatagtacgcggtattcaatgaatgagcttgcgcgagaatgtcacgagtgtgatctagttttctgaaagatgggttgatgttccctcctcactcttcgtatctggcagttgctaacagcttgttcttgtcgcttgcagttccatcggagtgacgttatgtattttacgtatagactatgtatatgatacgtgcttaaggtagt

SEQ ID NO: 116339 - DNA, 790 bp, Physcomitrella patens
  Intron number 1 from transcript Pp1s55_178V6.1 (locus Pp1s 55_178V6) derived from phytozome v7.0 (chr-ID scaffold_55; pos 1108892 to 1109681 reverse strand)
ctcatcacggcccgggtccgccttctgtcgcgcaggtacttgcttcattagcttcctatctcagaagttctgttctgaaattgccggtcatctatggctggatggtcttattcctggtgtacacaattcccctgtttggggaatccgcacttttcttacgagatttgtttttcaaactaaaacaacacatatatatatatatatatatatatatatatatatatttcatatgtatcattcgggtatctattgcagcagctcatatctcaacactaataaggaatattagtatataggcgtattgcagttggaatctttggtactctcacccccgccttggagtctctcttgcagctgatttcgacttcgtatagctttctgcggagttatatcaatggttttggcagattgtttctctaatttgcttattgatgcatctttaggttagtataagttgacatgagcatgcgattgaaattgcaattgagaagctttttagctgaaatcttcctgcgaggtgtcacttaactgagtcccacatgtgatatcttgcgatgatgatggtgcatacttaattagggcctcgcagtgatctgtcgttgctcccacaatgcaacagtgaaatgttccccgtttgcttatgaacagtaccatttgcaaacagttgaggattagggaagaaactcaccgtctttgttcacctcttgctggttccgaattcaagtgaaggctgacttgaaaagaatttaatatttcattttgatacttcaggatcaagtaacgaaactcg

SEQ ID NO: 116340 - DNA, 635 bp, Physcomitrella patens
  Intron number 1 from transcript Pp1s1_253V6.1 (locus Pp1s1 _253V6) derived from phytozome v7.0 (chr-ID scaffold_1; po s 1632081 to 1632715 reverse strand)
acgataaagacacacaatcaggtatttatctcagactccaatttggtacacgacaccacagaagttcaacagtcatccacagttcaacagattgagaaatgtcagagctacagaagaatagggggaactggctgcacaaagtgcagcaaactttattcagtgcaagaatttttctatgtggttggaattacccgagagggcttcctcggtttctccgccatcggccaaaatttccatgttttgcatcatctgtacttacgcagagctctttacaatatgacggctgtgtgatatttcacaacttctttttttccccagtaaccgctatgcttgctttgcttgtctacactcattacagacagtaaatcgctcactgcaattcagcggctctggcaaacgacctgataccacatcccatactgcacagaaagattgcccgaggatgatccaggaacactgcatgtcaggcaccgagtacccaaaccggaatcctatgcaaggttttgatttaggacctgattgctgagagactgattaggaatacaaaccagtagagtgaattgagtcacaccttaatcttgttttgcttttctgtgttagcttgtgataccagccgggcgaagtttgaagcgagc

SEQ ID NO: 116341 - DNA, 735 bp, Physcomitrella patens
  Intron number 1 from transcript Pp1s23_266V6.2 (locus Pp1s 23_266V6) derived from phytozome v7.0 (chr-ID scaffold_23; pos 1922136 to 1922870 reverse strand)
gtgttcttggtgaccgacaactacaaactcttcaggtgtggtgtttttgaagtaatatcgttaggctgttgtatgtgggatgctcgaatcttgatgcacacgagtccagttatttgcatgagggtccagtttcaacacacatggagaatgatgcgtggttgaaagcatttcaggactggttcgggtaaagtcggattgcacattggtagaagtctcgcgaaaacttgctgccgtcactgccctcttcactaattctgaaacgaagtatcaacgccaataaggaatattgtcgatacttggtttctgcacaccatttatgaaaagtttcgacaaaaagattagtgattcaaattgtagactaaaagtgaagattccttcccaggatgaagaatctttgacgtcgcactgagagtcagactgcttgaagcaagcacctagtgttgtggtctgggttcgtgagatgatcaagggtgtgaatgttattatctcatagaagctcatcgttttttatgctgtgatgaaatgtaaacttttactatttttcgggacaatcatgcttcctcacaatccatcgtagtatcttctattcccttcgaaatctgtaactgaccacgtgctgtcgcagacgttttgttttcttacatcacgtttcactcacgtcgcagtccctgggtcttctctgatatttgggcatgttttaatgtgtgaagttgcgcaggaggttgtggaactgag

SEQ ID NO: 116342 - DNA, 957 bp, Physcomitrella patens
  Intron number 2 from transcript Pp1s10_246V6.1 (locus Pp1s 10_246V6) derived from phytozome v7.0 (chr-ID scaffold_10; pos 1888188 to 1889144)
accagctacttccagccttgcagttcttcgtgcaggtgctgtgagtttttccaataatgcttatcaacgccgaattcttagctctcattgcattttctggcagtgttctctcgggattgattacaggtggagtggttatccagccatgggttttggaatgagttgactcataaagattcttgccgagtagaacataatcatgaagcaaatttcatttcaaaatattgctggtagagtatatgtatagcctacttcaccgtcattgtgttgctctttgaatgttaaccgactttcacgctttcgataagtcgaaagaagttgccgtccgcttcatgtattgagttgtatttagcaaataacgcaatcgcttgctgctaagacacctcaaacctagctgcatcgtgggaattgtaaatatttggggtgtaattggcaagggaagtatttaaccattccgttggtggtcagggtttagatgaaaaattatttgaggtatttataacgacggcccatgcgttgtcttagaaatacgcagaatttcaacacaggtttaataactttgcatcagttccgcatctgtagaatccacctagtttagtcgatgaagagtaggtttttccatgagggttttcgaggaaggatcttattggctggttcgatctcttttatcttgtggaccttgatgttctaatgcacatcttcacccttctagttttcaagtcactgaggctttcagagagagagagatcgagccatctcttttagtgttccacaatcttgtctgttccatgaatgaaaagaacactgtccatggctgagtatcattatttgacgaagagattctgccacgtcgatttcagtttttaatttgacctcgcactgatgtcgtttgaaagttgaaagacttagatactgggtctctaatgcacgttctctttctcccgcagaggctctgcg

SEQ ID NO: 116343 - DNA, 627 bp, Physcomitrella patens
  Intron number 1 from transcript Pp1s301_48V6.1 (locus Pp1s 301_48V6) derived from phytozome v7.0 (chr-ID scaffold_301 ; pos 473002 to 473628 reverse strand)
gaagaacctggtcaaccgttacaaggtacttgtctgcgttgtgtatcaaattttcgttcacgcaaacacaagccataatcctggacgttaacggtgcttgactgagtgccgtggagtttattttgaacattatgcttgtgcttcgctatttcatagcgtcacgccttagccgacacccaattccatttctttccgcagccttgttagcacctttctttctcttgtcaaagcaagctacaagtgatatcgttgtcttatcaactggtggagaattatgttaggaactgtcgtacagatagccttagctgcatgttggattgtacaaaacattatttttaaaactttcttttaaatgtcggtcatgtttcttcccttgcatgagtttaaagcttttggggcatttaattctgctcaaaactggagtatccttactgcgcacttcatattacctctcaagtggcctttctttcgtcttaaacgtctaatgcctctcatgcctgcatccttaatcagcattgtgaacttgcttgattgtgaagaggtcgtttgtttttgcactatttgtcttatcaatcatgtgtttggcttacaggggaaggagacgtccgagcctgattacgaggtctc

SEQ ID NO: 116344 - DNA, 993 bp, Physcomitrella patens
  Intron number 2 from transcript Pp1s34_344V6.1 (locus Pp1s 34_344V6) derived from phytozome v7.0 (chr-ID scaffold_34; pos 1726441 to 1727433 reverse strand)
agccaaacaataatcagggtgctgcacatattcaggtattcctttcacagaaccttgtaattaaactattcgcgtccaatcagtcaacagatgcatcagttttcctcaacttcaattgaattcaatggttggaaagtctctgagtgcaacattatttcatgttaacagaagaatatatatatatatatatatatatatgtagccagtatttttcttaaatcgaaacagaaggtgaaacatttgaagtcttgcaagttcaagacagaactacaccaaaagtctcactaaaaccaattttaagaaactgaattcgtgaaaatagtatgtctaggattacagaagagacaatattaccatgatgtatctgcacgaaaaagaatgcattaggactgtcagtggcactttgagttccttccctccaccaaggattttgtcagcggtagtttctacgagtttcagggatggctcctttgaaccgcagaagccttcgtgggattgccttaagtctgtctccaaacctcgtctctccctattatggaaataaacagagctcacagacccaactgaaccatttcatcttgctccccacacaccacaaaactcgggactagagtacttaccttgccggactagaagatttgctttttgaataatcacggatcttgatgtatcaatgaaacctggactcagtgcacaacttttacggcataaaacccaattactcggtgcatcatgaggctctacttcgaatgtcgatctcgccgtccattttcacaggcaaaataatctcgatttcaagactgagaacgttataaaaaaaaaaacagaaaaaaagaaagaaagaaaaaaggtttccacagaatcagagtgccttatcacaaagtaggaagacatcatgcatttttagtctttaccggaaatacacaatcaagagtgtggattgcgaaagaaaatgggtattcaatgtgtagaacccgtactcttctttacgga

SEQ ID NO: 116345 - DNA, 449 bp, Physcomitrella patens
  Intron number 3 from transcript Pp1s8_254V6.1 (locus Pp1s8 _254V6) derived from phytozome v7.0 (chr-ID scaffold_8; po s 2522022 to 2522470)
cctcgtgctcttcaaaagctcaggaaaaattacaggtgtgtttccggttacgttttcctacagtcttgcatgaagttcttttcatatcaacctaaggaattcagggcattggttttgccaacttaagttagacgacaatttgttggggggttgtctcggagtcttatataggaaaaaatgggtcaataagaattgagagaaactgaggtcgaaggagctcgaatggggcagtggccaatggtgttttctttgaagaaatttggccagaagtgacatcaaaaaactctagttccttctttggaatggaaaaagcaaccttcaacgattggtcgtgtaagtgatgaagcaactgtgaaaattgctcagaagctgcagctagaactgcagaattatgtaacattgcgtaccatcactgctctgagaagccctccgaaaattagtgcagacat

SEQ ID NO: 116346 - DNA, 591 bp, Physcomitrella patens
  Intron number 1 from transcript Pp1s61_320V6.2 (locus Pp1s 61_320V6) derived from phytozome v7.0 (chr-ID scaffold_61; pos 1762524 to 1763114)
agggcgttttggaggagtcgcttttttttagacacgtatgcttctcggccatcgtgttgttactagactggtgttgagatgaagctgattttgattttgtagaacaccaatctacaggtgtattaaacaagtttgagctctgttttttgttgcgttcgttggattaaatggtgattcttactgcaggagctattttgcctgtttcacgtggagtttttgtgttcacgtgacagttacttcagatggaatgaactcaacttagtttgtgtctcgcttagtccttctattatgtgcataaaatcttagtcgaattgttctgcgctttgactatactcatccactacctgtgcattcggaatgtggaaatgtaggtttatggatcaaaggacaatagcctaggctctcttcatccactcgatttcgacagtgcattgtatacttgaaacctttctgtgctgtaatctcactaaacgcgtcaacaggctgcggaagtggttcatttggctaaacattgctagaggtggaacctgaccgatttctttggaattgtgtgcagcttgcgtctcctcaaatttgaagtttcatcttgcc

SEQ ID NO: 116347 - DNA, 920 bp, Physcomitrella patens
  Intron number 1 from transcript Pp1s88_210V6.1 (locus Pp1s 88_210V6) derived from phytozome v7.0 (chr-ID scaffold_88; pos 1465804 to 1466723)
tgtctccctcctttcctcttcttcctttgtttcaggtgggccgtttgtttaccttgcggatactctgcttgttgcgttaattgttatggcgtggctcaattcggtatgctttttgttttttattttctgttactgttgttttgttgccgtgagtggagagtttcaattcctgggcgttatttgcatggacttttttcggtggagtgcggttgtgttggggctggggttgcctgtgttgtgactaggagggtagctttttgtttgtgtgtgtgtttgtgtgtgtgtttttttttgagtttctggttggaaagtgtgctgtgacgaggtgagtctaattgcgcgccgtgtctgattgtcgacgtgaatgtgattattgcacgtcgcgtggagttttggagtgaaattcttctggtttgggaccctctcgttggagtggtttgtgtcgggttctcacctggtttttgttatgtctttgtcttggattagtgtgtttgatcatgactctgcgcagtcgtgtttgtgaagtgggcagtttggtcgcgtgtttggttcgtaggtcttcacatcctggtaaatagcagtgtgaatgtaagtttgatgtatgttgtgagtccttaatggttgcatgatttcacgatgctcaaagtgttaccgcttgcaatcatgtaccttgatgatggccggttcatcaaccttaggtagtaccgcacaactgtgtcatatcatcataagtaaccaggacatcgtggtgcgttggactgttgtttcagaggcaaagctacaactttctccgtagtatgtttgcggtgtgctgcgttgagtattgttggagtatgtgtctcattgctgacgagtgtgacggggcatgcttgggttgtaatgcaggtgttgcattgctggtgatttgaaggtgttgacgg

SEQ ID NO: 116348 - DNA, 783 bp, Physcomitrella patens
  Intron number 1 from transcript Pp1s98_15V6.1 (locus Pp1s9 8_15V6) derived from phytozome v7.0 (chr-ID scaffold_98; p os 108053 to 108835 reverse strand)
gaggtcttctgcaattcggctccggcacttcagaggtagagtacttgcagctcgattccttttctcttttttttatatctgtttgtgttgcaactacgaataaggagatggagttcgatgacggataacaactgtgccgcgaccttaacgaattttctgtgtaactcgccacgaacggttgagtgttaatttgtgcgttcactgggttgttaagtctccttgaattcgctctccattgtgtttgagctgagaatgtgagccttattgcgatgcattacatgagcttgtagcatagaatcattggacacaccatttaattggtaatgttaactgggagcttctttcataagccattgagggaatactaggtatcgcatggagaccaattattgtagaggatgttacgacataagctacgtgctggggtttgaatcctggtctctctacgcattatgtctcaataccagggttgagttttggctgaaagatttagtgatgtaattttggggagcacactgagatgatgttagggttcctcgactcactgtcggagtttgaatgggagagagtttagtttattctgtatcgttaatattttgattgaatatttttccattgtgcccgccctttaccgagagaacttgaattttgccatcttatatttttctgattacactgttttgatgcgtactgctgttttcttctgttatgattgaataacgattttggtttctatgctacgatgcagttattggaaagtgcgttcaagaaagaaactgtggg

SEQ ID NO: 116349 - DNA, 676 bp, Physcomitrella patens
  Intron number 1 from transcript Pp1s76_46V6.1 (locus Pp1s7 6_46V6) derived from phytozome v7.0 (chr-ID scaffold_76; p os 266846 to 267521 reverse strand)
ctcttcgtgggttccaaaccaagcgggctctcaaggtaggcagcaggcgttgggagttgtctctcaccgtcgggtttttcgtttggtgccaattgaagcgcgggttcggttggattgtgtgtgactttgggttgggtgatttttatcgtgatggttgatggattcctatcttggccctcttttacgatgcatgtgggtactttgcttttgggatgcgcagaccttacgtggaattctttgtcttttttcttgttcttgatgccatctatccgcggtaacttttcatggttgaagtgcgttaaaggatttagttgtcttgatatgtgcattgaagagttgtaccttttgacgctgagtaattctttacgggaatgtgtgtggttttgtttctcttttttaacatctcctgggttttgagctggtttctagttgagtctggtgcgttttattgatgacctttgatgtacttgtgggtttacatgttggagaaggtgttgttgagcatgcattgtcagccggaattattttttcttttgacggactgacaacagcatgttcatatctttctctgtggcaatgtaaatcattagacgaactcaaagacgttatacatgaatgttgtaagactaaaactgaatctggcttatgcaggtgatagcggggctccagaacttcg

SEQ ID NO: 116350 - DNA, 829 bp, Physcomitrella patens
  Intron number 1 from transcript Pp1s68_127V6.1 (locus Pp1s 68_127V6) derived from phytozome v7.0 (chr-ID scaffold_68; pos 583205 to 584033 reverse strand)
agaaggccaacgagatctctgtatctgctgaagaggtgaagttctttacaatgtcccttgtggtttcaggcgattctgttgaggggtttctctattgtgaagaatctgaatgtcgagttaaaaatcttataggttttgtctgtaaacgatatctgtaacttgatattgtcaatctgtttggagttgaactagtgcagcgcataggtctaccagaatcgcgtgcacatggcagttcgcaactagaggaaagtgcactttcttatttcattgtcttaatgaaatcatgggtcagcatcgattcaatggtgaaaaatgagtgatttcgcacttgaagttgtatttctattagttgtcactttgactctgtttctcagtttgtttcgatagtcaaagtcgacaaggtgtgaaggtgagcagtagaggatttgaatgtgacagttttatttctgatgtcaaatgatcggcttagagtatcttcatctctgttttctcgcttcttcttcagcagtagggaacatggatttgaattgaccgttttattcgatctcctgcttgatcgtgtcttgaattcagatgcttaaattatatttgatctcctccctctaggtattaaaacctattagaatcgagaacaagattattccttacatctttgtagaaagttgcaatgaccttagattgtgagtcgactgctagggcaaccggaatgccagctgttgtagggcaagcaaattctattagagctaatccttgtttaccgacgatttattttttattttttattttttttgtaggagttcaacattgagaagctacagatcgtggaaac

SEQ ID NO: 116351 - DNA, 706 bp, Physcomitrella patens
  Intron number 1 from transcript Pp1s395_1V6.1 (locus Pp1s3 95_1V6) derived from phytozome v7.0 (chr-ID scaffold_395; pos 5832 to 6537)
ctgatcaggtacggtctgttgaacacagcttgtgggagtgagagaatgagaaacgtttttttggtatgtgtaagtcagtcaagaagccatcgtttctgatgtctcgactccggcggatctgagccaacttgtctcatcattcaccataccaaacatcgcacgtcgagacgacactcttgacagaacgagaactgacactttgtcgaaatcggcttggagctcttgatagtgattagagagatagatagatagagagagagagaggaggagcccagtgaaaccaagcatggttttgactggttttgaagctggtggaattcaagcgggtttgcctctgtcacaaatgcaggaggtcttcagtactcacaaaacgagcttcaaaacccagtcactgttgttgcattcaacacctggatgaaagaaaccgttccccttttgttgaagacttgggtagtacgtaaatcatcaaactcttgttcacaatcgaagcagttgaagtggatgatgattcgtgcctgtatatggaagggaggaaggaaagggtcgagcgagagagagagagattgtttgtgtgttatcatctgaacttcttgtgcgagatataaaaagagtaattataaaaaaataaataaaaagaaaaaagaaaaaaagaaaagttcttctggtttcagtgtgtggagcctcgaaacctccgccccaacttaat

SEQ ID NO: 116352 - DNA, 628 bp, Physcomitrella patens
  Intron number 2 from transcript Pp1s14_64V6.1 (locus Pp1s1 4_64V6) derived from phytozome v7.0 (chr-ID scaffold_14; p os 382855 to 383482 reverse strand)
aagcaccaatacttgcctaaggaattgcaggtttggcgccatttcagttgcatcgtattttgattaattaggaagcgtttggcttgggaaatatcgtttggtgcagtatgtggaaatgttcgagtctgtttgatctccaggggaatatttttcttcagttgcttttaggtagatggctatttactaacatactatctggaattgtacttattaacctacttcaccttccgcattcttgaacttgcattgtgctattattttgcaagtgctagttcattcacgttaaacccagtaacatcaccagtgttcataatagctttttccgccttgaaattagtttacttatgtggttgcttctagtccactaaatgtctgctattgtttagacttacaaaatccatgcagcagtgtttaacctggtgcagcagaggacctccaagtggcagtgtccgctcgtccaccggacgcatgttcctgacgcgtgttgattcatgtattaaaattgatggcactgggattcagtctagttttgtgatttatatctctgatttttcattaaatttcgctaatatcgtccacctgtcttgttgcaggcaaagcaaactccgtacgagccctatttgcaaga

SEQ ID NO: 116353 - DNA, 704 bp, Physcomitrella patens
  Intron number 1 from transcript Pp1s202_94V6.1 (locus Pp1s 202_94V6) derived from phytozome v7.0 (chr-ID scaffold_202 ; pos 595438 to 596141 reverse strand)
attactcaggtatgggtgacttcttattgttagatgacaatatatggatgaagttttgtataaagatgaattcttgtcaatggatgagaatatctaaattgagtgatgatggaggtacaattttttattttgcttgcttgtgttacgttgggctaaattgagggagtgagaaggttaggcaataattgcaattcattggatattaaaatttggtgaattattgcatggttgaataagctactattagggtgatgcatgcattttctcataagtcaaatactaatatttgatgggtgcatcttcaataggtgacaaggccatctcctagtaataaacttgagcatcctaaagcactattttccaattcttatctaaattatggctaggttggatcctacaactcatacttcagaatcaatgttgccaaattttaatggtgtgggtaatgctctttccactacaaaatcaaaatgtcttgagttcaaaatggttttaataccttggttgtattattgtacttctttttataatataggtagtgtattttcttttaggcatgtttttggttttctctagttgtaagtaatgttctagtctttataatgtttttttgattgtattgacaaccatatgatttaatactggtccttggttacgaaatatgtgtagatcatactcttggagttgtaccaagcatatattca

SEQ ID NO: 116354 - DNA, 846 bp, Physcomitrella patens
  Intron number 1 from transcript Pp1s117_200V6.1 (locus Pp1 s117_200V6) derived from phytozome v7.0 (chr-ID scaffold_1 17; pos 1185773 to 1186618 reverse strand)
gctctcaatctcggtgtgagtcccagttcagcataagtttctaaattttgaattgaaatttcttgaattccttcaaacttcttgaattctttgtctccatagaccaagtttttatttacactttattgactttgtttttttatttttttacactagaaaaattctatttcaaataattataacaatgatgtgaaaaagtattggagtgaaatgtacttagttgcatgtgtagtgaagatccccgaatacaaaagtattgtgttcagactcacaaccataatcaaataacgtattgagggcaatcccgaaacttggtgagtcctgtaagtccagtcaaaggcaaagttgtgatgtgaggcaaggcgaggcgaagtgagctagactctaagctcaaactcctcgcattggacgtgatcctatgttggatcaaaatttggctaccttgtattgatcagtttttctttcaaaatgaagttgaggcattcttggcgcaatttgaatctcttttttttttttttttttttttttttttgttttgtctactccaccacctgcataatatgtaagacattatccaaaactctatatgcttccatgtttgtgtagtgcatggtttcaaatttaattgtttcatagattgttcaaacctggtttaggattgaatttgttttaggatggaattagaagatttgaaaactttttggcttgatgaatatggggtttgttttaagcctcctcatgattcttgtttttcattcattgctattgtcactccacaatacattgcatgtttgagcacttgatgtttgagcaagtttgagcatcggagtagtaagggctgcaatt

SEQ ID NO: 116355 - DNA, 544 bp, Physcomitrella patens
  Intron number 1 from transcript Pp1s214_22V6.1 (locus Pp1s 214_22V6) derived from phytozome v7.0 (chr-ID scaffold_214 ; pos 167396 to 167939)
gcaggtacatagttgccatctctcactcctgtgccttctctatgttttttcaaacccgtcgaacaaacgaagtagagtgagacagcgattgaaggtctcaccatctcattacactttttggaagtaactgcagctttatcacagagatgcgttagtggcagaaatgaaattttcttgcagtagctttgattagagggtgaaatttcagtgcattaatccctaattcatacaacattgtggtgaagaatcagagtatcatcatctgtcttgaccttctcatgacctcatactagcgaattcatctggctggttcataccgccatgaaatgtgtcttagacttgcaggtcaatctgggaagttagtttcccttgtttgtgatggaaaattccaccagggtatgctaacatctgcgtgatatgcagaagttaaaaacgctggtgcataacacgaaaacacatatgttgcaattttttttttactaacagaggaaagaactgtaactttgcagaccagtagtttgcagtgggtgttgacagctattcc

SEQ ID NO: 116356 - DNA, 378 bp, Physcomitrella patens
  Intron number 2 from transcript Pp1s351_7V6.1 (locus Pp1s3 51_7V6) derived from phytozome v7.0 (chr-ID scaffold_351; pos 42560 to 42937 reverse strand)
tcgagggcagcaaaaatcaacatcgaacagatgtaatttccgattcaatggtgataatacttcttgcgtagcatgaaaacttcctcaccagccacaagaaaaacttagacttaatttttttgatctcttggaggcagtttgcatgctgctatgctgccccagattaggtggtatactgtccaaatgtattctatgtttctaaactcactactgtagacaatttgacagtctatgaattagatttagaagtggaatctctcgcacatcaacccttgtgattaatacatatttcttcccacggctccattatattttatcaacttactttctcgactttacacagtaagcagattcttaatcctccagttccgctggcac

SEQ ID NO: 116357 - DNA, 704 bp, Physcomitrella patens
  Intron number 1 from transcript Pp1s34_56V6.1 (locus Pp1s3 4_56V6) derived from phytozome v7.0 (chr-ID scaffold_34; p os 329996 to 330699 reverse strand)
tgcgacgggtaagggcacttgctctaaccgtagtgacgtcgttgtccactgatttgtatctcgtgaagcagttgaaagaatgacggatttgaaggatctccttcagaggtcgagcatgggcaggagttgcctgtgttgcagctatgtttgttttattcagctgtagctctctgcacccccacgagaaccctcgccctgctcgaaattcttatttgggcgccatgatttggcttgcaaatgatgtcgtctagttgtaactctctgtcttcgatgcacactcatcattcctttcgtattgtttttgtcttttggtttttgtgttttgtattgtttaatcgtgcctacatctatgaccttcctgtgccactcagtcagactgagatcgaaaagattttagcaatgcgacatggtcgggagtttgagttggtaatgaatcggggtgattttaacttgttttagagttttggcgggcattcatcttcttcaatacattcatgacccaacaaccggtactcgttggtttggctcaataattatattgtgaagctggaatggttctgagcctgtgccaagattcccacccgcgatatggtgctgtatttctccgaagttgttcgtttctcattggtttcagtgtaggcacacttatctccttgtgcgcttgtgcaggtgcttttagtttgcaagggtcgagggttttcagc

SEQ ID NO: 116358 - DNA, 548 bp, Physcomitrella patens; identical to SEQ ID NO: 115516
  Intron number 1 from transcript Pp1s83_237V6.2 (locus Pp1s 83_237V6) derived from phytozome v7.0 (chr-ID scaffold_83; pos 1526308 to 1526855)

SEQ ID NO: 116359 - DNA, 770 bp, Physcomitrella patens
  Intron number 1 from transcript Pp1s154_96V6.1 (locus Pp1s 154_96V6) derived from phytozome v7.0 (chr-ID scaffold_154 ; pos 610360 to 611129)
ctcagcagaagccacattctcccggggggaaaaaggtatttcaatttacttttacttttcatccacgaatgagaattgtatttctcgctaacgaaaacgaatgaatgaaccccgtaactaatccacttccaaccatatccagccttttcattggacgagtcgaagtgttgagtgcgcatggggcttttttatccgattccacgtggcattgaatggttggatgtgagatgctgcagaatctgagaggaagaatgttttttactttgttgatgaacacaaagccaacccctccttcttctgttttctcatggtcaaattataacacattatgtgtgaatgatcctttgaatcaaacccactcgaattactcactgttcatatccactcacgatgcccgcaattcaccatagtatcttcgcttccgagtaaatccggatattaattaaaggattcttcttcagttcgtccgcgcatccattgaggaacgatttcatccatccatccgtccgtgcatcaggataatcattttatctgtggccacaaaggcaggaggagttaggaggcaaaggaagcaagctctcagacaatacgtccacagccacacgcctcctcttttacagtttgtggtttcggtttgtttggtgtggtattttttttttttttttttttccttacatcgcgggcagggggggagaaggggcaagagggtgaagaggaggagaggacggtcaccactctggcacacgtgttatgagcaggaaccctcttca

SEQ ID NO: 116360 - DNA, 356 bp, Physcomitrella patens
  Intron number 1 from transcript Pp1s107_25V6.1 (locus Pp1s 107_25V6) derived from phytozome v7.0 (chr-ID scaffold_107 ; pos 164662 to 165017)
gtagctcttccttcaaagatatctttgcaggtatctcgccattcaaaggactctcttcggggtagaattattgctattttgtgacatataggaagaaaacattgtatgcttttctttaattggcttgtgggagagagctgttgggatgtacgttaccctgttcattcccttcgctttatagcttggactctgtcgtgtgtcttctgaatggcaagtcattgaaaatgttttcattcacgatagattgtgacttatttacgcgttttgatgaaccttacttagagattcgccgtttgcaatttaagtcattcagtttcatttgatcttctgagacgttacatggtgcctccacaggc

SEQ ID NO: 116361 - DNA, 1009 bp, Physcomitrella patens
  Intron number 1 from transcript Pp1s295_66V6.1 (locus Pp1s 295_66V6) derived from phytozome v7.0 (chr-ID scaffold_295 ; pos 489150 to 490158)
atccccctagcagcggagctctttcgcaccttacggtactgcgtcaccccttctccctacatcctggtcgggaatgtgtgcgtcagtcttctgagattgcagctgatgggaccgagaggcagcgggaagtaattggcgtttgagtcgtggtagtggtggaggaaggaggcataaggctagggttttgacgagtaatacttgggtttggtaggtagggttttagtgaattagaggaacggagaattagtggtctttgcaggtgttagccagagtttgtgtggagtcttggctagctttgatacagcagtcttgtcccagatgtttaatccctggttgttgatttaggatttttttgtttgttttgttttgttttgtttgtttgtttgtttgtttgtttttgttttgttttgttttgttttttttctttcagcgtacgattccatgtgaatgagtaagcatgagtgtgtatctgcattactgttgtgtttttggtcagtaaataatttctgtaagggagcgagtgaccaagttgggctgcgaacaatgctctctgtcttatccagtgctcaaatgggttgtaggagaagagtagattatcttcaattctatactgttgccgaatatcttgtccattgtataacctcatagtaatgacgctacttagtgtaaaacatagttgtatattaggtcgcataaatcgctttcgctcatggttaatagcattatgtggaagattagactcctatataagctacatttgttatttgagtttttttatggaagtcaaccctgatgtgtaatcacatttttctgactggtatacaagcctgattttcgagctttttttgtaaggtctcaattcttttgtagtgctgtatattgcgattacgaatttcaatatgcttgcgtgtccctagctgtctgtgattgcgaagattcccattgaagctctgaatttctaccggaaacctgattgttatttgaattggcatcagggcattgacggatc

SEQ ID NO: 116362 - DNA, 998 bp, Physcomitrella patens
  Intron number 1 from transcript Pp1s43_45V6.3 (locus Pp1s4 3_45V6) derived from phytozome v7.0 (chr-ID scaffold_43; p os 319262 to 320259 reverse strand)
aatacgagtgagtggataggtttgcacagttttgcgattgtcggacttgcattgaaactgctacttgttgagacgtcatgttgatgtagatggtgggtcacacatggtctgaggatttgcgccaggaattgagctaggtttgaagagaggttgacgttggttttgaggtttttggggttaggccttattgtgatatggatgggtgatttggaacgaactgagtgtgtaggatgacctaccccatgctctgcagtgggttttgtgaaagttgactagagatagttttgatgtgtgccgatttttatcggaaaggtgtcgcaaattgggagggagtggtggggttacctaacgcattttatatgtatgcggtttacgggcttttcttgtggtagtttgagggtatgtttatttgttcggagtaggtcaggttcgtggaatctgtttattacacgtaacgttacgatagtcttataattttaatggacgattgctcattctgtgatgcaggaagtttcgtgaatgcaatgtttgtgccagatcggtcgtcagcgtgaaccctgcgtctcttttcaagaagatctcaagtttttagggcacatgtttcgtcttctccgtcttctccgtctcctctactgtatcgaaggatagtatctcgtatcgactggattggtgcaggttgtcttcccctacttcgtctctctggggattaggggtgacagattacacgcgtggcctagtgagggtacttggtcttagttgatgtgtctaaaggccaatggtattccaacccgaatcaacttcaatttttcgtatttcatgtctcttattgatgcaagggacctccaccctcagggctgtgtaaatgcgacgcgcacctgtggcaatagcttgaatagggtgatcctaattaattccgtgactacagattttgcctgtcgatagagctcacaggtggttctgaaaatttagctcctgctgtaagctttattttaatttca

SEQ ID NO: 116363 - DNA, 631 bp, Physcomitrella patens
  Intron number 3 from transcript Pp1s8_73V6.1 (locus Pp1s8_ 73V6) derived from phytozome v7.0 (chr-ID scaffold_8; pos 563592 to 564222 reverse strand)
atacaccgagagcaatcttaggtaacgtgtttctttcgtggaaacacgctcatatactctctgaccacaatgatttgctctgcatctgttatgcattcgtttgttacggcattgtgactacgaggcttaggttgaagtttgcgttttctctattcaagttttttaaaagttcctcccgaatatcgcatgtaattcgacaagatgtgagagtttccttttgaatgcattgacaagatatcccttatttttaagataaataattcctgatcgcagcaaacaggtctttgacctgttgatagagtgtacagttctctttcatttctgttattcatgtgccactggaacagtcaaatactatttttgagttatttggtgtctacatagttgaatgcgtctatgtagagtacagtcgtgtgataagaaatgctttgtgttgggatcatgaatggaactctatttggtctttgctttttgctttttgtgtatagtagaagtttatgaccctcgggattttattttttggagaacttttggtgtatcttcttagtattgtgtcaccctagctacgatttcgccttaatccgattagatggtctaagttaccaaagaaaaggtctgacggaataaacag

SEQ ID NO: 116364 - DNA, 541 bp, Physcomitrella patens
  Intron number 1 from transcript Pp1s98_84V6.2 (locus Pp1s9 8_84V6) derived from phytozome v7.0 (chr-ID scaffold_98; p os 468768 to 469308 reverse strand)
tcgttgtcgtctgaggagaatcgggcggattcgaggtgagtggtggttctggttttgatgctcagttagaagagggttgttggcgtcgtcggcgttgttgtggttgcggttgttgttgttgttgtagagttttaggggtggtgcattttgggtgagagttgagagtaaggtcgtcgaagtggtggtgtatgatagtagagaagatgagggtggtaagacagtgaggtcgcaattccagattgaaacagttttagtttgtgaggtagtcggggcatttatatggtaaattagtctgattagatatgtgggtccgctcaggattttgaaagtgggtggaatggtgtagagaggatgacatggagagggttttactctaggaggttcatggtgcaaatttttggagaggactgaatgagtgcgggttatttgactgatatttttctgtgatttctatcttatttctattttttattttatgtttgtttattttttttagtttttttctgactgtccaatttgatgctggtgaagctaaggacac

SEQ ID NO: 116365 - DNA, 689 bp, Physcomitrella patens; identical to SEQ ID NO: 115228
  Intron number 1 from transcript Pp1s220_84V6.2 (locus Pp1s 220_84V6) derived from phytozome v7.0 (chr-ID scaffold_220 ; pos 543125 to 543813)

SEQ ID NO: 116366 - DNA, 430 bp, Physcomitrella patens
  Intron number 2 from transcript Pp1s454_1V6.1 (locus Pp1s4 54_1V6) derived from phytozome v7.0 (chr-ID scaffold_454; pos 17533 to 17962)
cctacgtcaatatcaggttgcaattcttaagcattgctccttgtattagacgctctgccttaattaatgcagttccatgaaggaataatagttctgctcctaaataggaacgttcgtataatcaggctgatattgtgtttgtttcaatgatggttgatgagcttaatgtattgactttatctggttttcaaacagtagttaacttgttgttctttgtgaaatagctttgtattttaacgatctggttgttaattaatatttgtgacataccataattaaatttatagttatggattttatcgcttcaaccgctatatcctctcttcacgttaacgaagtagtaagttgttcctgaaaggtttgattcagggtagaatttgctaactttgtgtgtgccaactttgcaggaaaggaaaaattattccgggtt

SEQ ID NO: 116367 - DNA, 440 bp, Physcomitrella patens
  Intron number 1 from transcript Pp1s124_11V6.1 (locus Pp1s 124_11V6) derived from phytozome v7.0 (chr-ID scaffold_124 ; pos 123606 to 124045 reverse strand)
gcgtagacggccaaaactgtggcaacttcatcacggtcagtgaaaagttccaaacttattgttgttaggtgatgatgtagcctctcttattgaatttgattataatgtactcgttacgattgctggaagcgtaacattttggatgcaaatgtggaaatatcactgctctgacagagatcgtgatagagggattgcaggtaacacctatttagggcggttcgctttcacagaactcctaattacagccaaccatgaaatgttcatatataatattactcttctcatgtagttaatcagtgctctaaaattttgtgcagtatattgcatgtcccaaaataagcacattctcttgtttctctgaagatcatgtcacattgatgagtatgtttgtggcccatgaaacaggatcgcccaagcaccagagtgcaagcatctccagg

SEQ ID NO: 116368 - DNA, 928 bp, Physcomitrella patens
  Intron number 2 from transcript Pp1s242_6V6.1 (locus Pp1s2 42_6V6) derived from phytozome v7.0 (chr-ID scaffold_242; pos 89648 to 90575)
agtgtttcaccacaaaagccccctgtcaggtatccttttgatctcgcggaccctgcctctttcatcaaatcacatagagatttacgtagtttggaatatgaatatggctttgtaggagtttcgttaagatcttctgtctgaaccaacattaatcatgtcagttggttcctttgtggacttccttcttcttattttcttattttcttattttcttattttttatgtgataggcatcttattgagattgttgtggactagagaaatagttgatcgcaattgcaatcaaagcgtaaatgtttttccaggacaattttcctggctcgcttatgacgagctgcattctagacttagcagaatcaataccgaaagttgttaaagagagtatgctgattaggttaatggagttgcgatttgtgtgttcaaataacttggctagggcaggaatttgtgaaatcgaaacttaggcaattaagtacactgtacgtgttttaagtgcttcgactatgagtaagaggtactggacttgtgatctggtgctcaattcagtcattcgaagagacaactctaatcctacaggcctcttccaagttctatagttctggatttggtgatattggtcgttatcgtctcacaatcgattgtgtctatttgtaaacgaggatacccgtatcatatggattgggattggagttgacgacctgggtacgagagctagtctcatatcgtgtctagaattagggtttcatttgagagcacaaatcggactacatgttcttgttttttactcaacctctgctcactagacatcatatccgagtctgccaaattcgtctatactttgttttctgatcttttggattgtgcgatttctcttctgtgtgtgggtggtacagcaacgtgacttgtcgctactgggcaacatcaggga

SEQ ID NO: 116369 - DNA, 859 bp, Physcomitrella patens
  Intron number 1 from transcript Pp1s10_139V6.1 (locus Pp1s 10_139V6) derived from phytozome v7.0 (chr-ID scaffold_10; pos 914962 to 915820 reverse strand)
ttcgcagcgtggtgatcggagtgaagcctcagcaggtgcgttttggaagaatttgtggcaggatttttggacagattgtagtgaattgagagctaagtgagcgggctaggagcttggtttagaagaagaagaagaagaagaagaagacagagcagctttggtctggtgtatttttggtcatcgtgtgtgcgtggttttgtttcggaggttttaatgctcttttcgatcacgtttgataatatggaatagaatgatgtatgatgattatgcttcgttttgagctttatttcttttttgctggtttagttttatttggctgtggaggagttgaatttctaagagtttggagagcgtgaattgtggcaatatgtgctgaatcggctgtgatcttgagaagtgatggacgtggttttgaaattggtggctggatgagctgcttttttctgaagactgatataacgtaagggttcggtgagggtgtgatgcttcgtacgtttgcaccttgcgtggttgcaaatgaaatcattaaagattgaaatagagaaacatctgtcgcgcggacttttcgctgcggtatctttttcctaatcggcggatgttgatcattgttttctgctgcgtgtgtcgctgcagaatttttgttttggttttggttctgaccgggattattttttcatttttttatttttttttcccttaggttgcctgacgatttggttcgggtcttgaagtatgaaagttcattttctatctttgagttgtcactatctcagcctcagcacaggcagtattgaatttaacaagtttttatgaagtactaggttgtgagggtgtggatgatcggttctgttttgcagcc

SEQ ID NO: 116370 - DNA, 867 bp, Physcomitrella patens
  Intron number 1 from transcript Pp1s34_160V6.1 (locus Pp1s 34_160V6) derived from phytozome v7.0 (chr-ID scaffold_34; pos 774736 to 775602)
gaaaacgtcgagtaaagtcgcatttatgctcttgttgagaggttgattttccttcttttttgcatcaaattgatcgttcagcgtagggccgtttcttagctagagaagtgtcagtccgttcacacggtgtgtacgattaaccttctctttcaatattcggaatggctacgattaggtggaacagcagcacagggatgcgtcggcaattgtaacctccgctcacctggaaatctgtgatccattcttattcaaaacctttgctccctattgttgggcaaattagagtgtgataaacatagtataccacgacctggacgtgtgcgtagttggcagctgcggccttgctccttgcatttgatcaaaactggctggtactggaaagtaatatataagaatttgatataattcgttatgactgactgcgataagcttgcggttggatccaactgaactcggggtcgtacatacattgtcggcaaatttgatatcgtatatttgaagaatctactgactacttttgtcttcagacttgcgctattcactccacttccattgtattgaagaatgtggtccatgaccaagagtatagcgccgtgtttatcttagttgtttcatcctaaccaccgtcctagtcccaaagccactatctgtggttgggcgaaggtaccaggaaattaagagttactaaagtcactctgaaggagagtaaccctctgccattgtcggaaagcttgcaggcgcgcttcgaagatgttttgaatgttcatttatttatccttccattctttccccctatatatctatttatccacatttcattgttattaattgtatggctggcagagcgaacatttctcaggtgttccc

SEQ ID NO: 116371 - DNA, 785 bp, Physcomitrella patens
  Intron number 1 from transcript Pp1s97_123V6.1 (locus Pp1s 97_123V6) derived from phytozome v7.0 (chr-ID scaffold_97; pos 766703 to 767487 reverse strand)
agagcgaagagtgcctgttttgcaaccatctgcaggtgtgcgtttcgacatcgacgtgtaatcgagttggaatttttcgcatgtgtggaattttcgtacctggagctttctgtcaagtaattggacttagcattctgttgtaaacgatgaaaagattctcacttttctttttaaatggaattaggtgatgctgtccatctcgcattctctggaagtcattttaagtgtcggctcagttgacattttgaagtcagggttgcctgattttgcaatttgctgatggttgtggttatgctcatcgttttgtgtatgataacatcttcgcatcgaacaaatattccataagcattattaagattgggattggcatttttatctttaggccacgttgagttatggagcctgctcacttgagcaatcgaggaaaaaacaaaaatcgacagacttttcagattcttgaaagcagtccacacgaaattttgattcaaactgagtacaaagctatgccaccggttgaagaaggatttacagcttcgatccggaaagccctattttagctggtgtatgtggctcaattagtagatctgtgcagtcttctatgctaagcttcaagtataatgcctgagctctgccgtgtactttcaagagcaaataaactaactactgattatttagcagaacttgagaggttaagccttacaaagaatcttaacaataattaaaaatttcgtatacgaggtaattggtttgacgttgatgtatgcagcatccagatctaataggtt

SEQ ID NO: 116372 - DNA, 916 bp, Physcomitrella patens
  Intron number 1 from transcript Pp1s98_27V6.1 (locus Pp1s9 8_27V6) derived from phytozome v7.0 (chr-ID scaffold_98; p os 153048 to 153963)
ctgatcacagccaaggtaacacagactggtgatccccacccctcctcatggtcgcagaatgtgctttgaattctcactctctgcctcggaagggacgcacactgttgttgttgttgttgttgttgttgtgttgcatggctcgtgtttctcgcaatgtggatggctaatttgtgctctgaagtgtggactcggtgttgctgtgggttatattcagtctgccgtctgtgaacgctgtttggtcaagttagagtttgacttggtttcgtgtttcttctaatatgacaaagtgcaggtggtgttgtttgccatctgttgtgtaattcacgtcttggttttattttttgtttgtttgtttgtttgtgtgtttgtttttacattgttttttttttttttttttttttaatgttttttcgcttttgtggttggtaatataaagtgagtttcgaaaaaggaggtttgttttcaaattaagtgggttggacaggtatacaacttatgcaaaactggttctggaacttcatttgacttaaatgaatttgacagatccatcgacctggtcgatttcacaaactttttcacatttcactgtgcttctttgtgagtgaatatgagagagtgcttgagattgaacctgttttgccaggagatgaataacactctcttcattttttgttttaatttttttttttttttttttttttttttgtgtgctgttgtctaagctctttcagcatcgatatacttctgtaagtgctgcttcagaaggatcatgatatctagaggcgaattgtggtattacttacggatgttgggttttcttttcttttttctagttctttttccccacaacaaattgagctcgcatgtaatgtggattgcaggaagaaagccaccaccatctgtgccgactatattg

SEQ ID NO: 116373 - DNA, 584 bp, Physcomitrella patens
  Intron number 1 from transcript Pp1s13_289V6.2 (locus Pp1s 13_289V6) derived from phytozome v7.0 (chr-ID scaffold_13; pos 1909238 to 1909821)
ttttattcttagctacgttggtgttttggaggcaggtaggatttcattggtttcctatctctccgtcctctcttctttttgaattatgtcacaggtggtgtaagtagttacaattgcggtgacgcagatcgcttcgtttagtggtggtgaaatagcgagcatatagtcctgtagttacgagttttcttttgtagcgtgttttcgtggagtagcctgtgtcgaatttgtgatggtttttggttgtggattgtgtcacagtcagaaagtagcttgtgtcatgtaattttgcaagcgtttgttgtaaactagttgaaaggaataaatccgttagagataggtcacataggcagaagtcaaatcaactgatatgcatgttcctcgaaataattttctccatacactgcctgcagcagtagcttgtgctcatctgcacgaaagacgaataagaatattcataattctttggtgaatttctgtggaataatagacattctacgtatgtttgacaaactgccagtcattatacttacgatttcgacggattgaggaatttttgaaggtcaggtgtgaaattgagaagaatt

SEQ ID NO: 116374 - DNA, 937 bp, Physcomitrella patens
  Intron number 1 from transcript Pp1s245_51V6.1 (locus Pp1s 245_51V6) derived from phytozome v7.0 (chr-ID scaffold_245 ; pos 226293 to 227229 reverse strand)
tgtgagttactgctggatttttaaaattatcgggtgtaccagtcagaatgccttgggacaaagaaaaaattgaagtttcttgttttttgtttttattttcatgatttggtggtttagcggggacttacagcatcgcttgaaatgctcgttgtgatgagtggattaacgaggtagcggcacagcggaggtcgtgattgtataatgagaagtgaggtcagacgaagaaggagaagtatttcggtttcggtttgatctgagaacgtgttgttgcttggtcgttaacgatgctgacgtttcatggcgtttcaataggctcgctagtgtagtgctacatatttcatggattgtaggcggtttgtgatgtgatatacttaacaaagtaagcagtgtttctttagttgttcgaggcgagcctgttctattcttcactctcttgaatttcagttctttgtatggcttgtctacattcccctcaacgtattagttaggagcattgcttggagtggctaagacaggacagactacacggacactttcctttgggtttaagagaaatctatgttcagctttaaacggcgaaacgtccttggactctcttaaagtcgttgcactctctgcagcttctgcattgtagttgctgtgagggagataagttttgaagcagttttttcccctttcatatcaaattttaggctaagtgagctttaacttttttggaagcgttagctcgtatcgtaggacatgctccgcaagtgttgtagaattcatctgaaaagtatcacgatgccctgtgcaaattttgaatgggatcgtgaggcttagctgagaactacgtgcaccaaagcaagcatttttgtttttatttttcagattgtacgacgcaagtatattgataattccatctgcaatgtgtagcggacagggcggactcagcggg

SEQ ID NO: 116375 - DNA, 573 bp, Physcomitrella patens
  Intron number 2 from transcript Pp1s98_138V6.1 (locus Pp1s 98_138V6) derived from phytozome v7.0 (chr-ID scaffold_98; pos 788887 to 789459 reverse strand)
actgcgcgattccttttcaacttgacttcattaaggttagctggcaatttttacattacttccactgaaaacttttacattacttccactgacaactttttttaattgttcatttttgtacatgttgaagtgttcgtttgttgtgactgtttgcacacgcacgccaggttttggtttgggcatcagtaacaccgccaatcgctaaattgaagtttcttcaattttcgtgcataggcctgtactgccctttctgagctctttcgcctcaaaacaagcgatcattctgaattgatccgacgcaatcgatggctggcctgtttatggatgttattgagctgttggtcattctcgcaggaatttgtatagcattacacatgttcaaattgaaaatgagtaacatatttgctatttaatattcaaattgacacattcgggtacggtttattttgcacaagaaatattcccttaccgattttttgggaagtgtacagaggtggtcgttgcatttactagattattgttcttgactttttggtaggtctctatcacattggcgatcgagtgcatttgctg

SEQ ID NO: 116376 - DNA, 528 bp, Physcomitrella patens
  Intron number 1 from transcript Pp1s34_364V6.1 (locus Pp1s 34_364V6) derived from phytozome v7.0 (chr-ID scaffold_34; pos 1876483 to 1877010)
gctcaggtgtgaattcccctgctttgattaaagcgaaaggctttttagggtagtccgtctcttctgagtcgctgggagttacggcctcaaaaaaggtctaagagctgataaattttgttgccaaacccatatcgccgttgatccctttgctgaaggacgccagaatttgaataaattgcaatttcttgcgtaattaccgtcgtttcttcagtgaaactgattttctgtgtcgtcagaatataattctgctagtgtgtaccatgttgccattttcaagcctctaagtctgttttagatacttgttgaattgtggcgagtccaaagtacgccaactcgtttcttgagcaattgttttttcaggctctgtcatcctttgttgccatgaattttaattgatagatatgtccacacgattaggacgttgtcatctatgagcaattatgcgtttcattacgactcgggtgtataggtgaaccaaacttctcctccgtcgcgaaataacttggaaacctttggtgcagacatcaa

SEQ ID NO: 116377 - DNA, 733 bp, Physcomitrella patens
  Intron number 1 from transcript Pp1s288_13V6.1 (locus Pp1s 288_13V6) derived from phytozome v7.0 (chr-ID scaffold_288 ; pos 129643 to 130375)
cctcgacttccagcctcgatcacgagcttcttcaggttagtctgcaggttcctaagcgtgagtccaaatcctaaattttgagttacgacgtatttctctggtcagaggtctttgaacggcaaccctctgcaaagaaaattttgtgcaattagaacaagctggatacaatcatgtgaattttgtggtcacgataatgaaaaatagaagtcatggacttacgttaggtcatctttagtgaattccaatgattcatgtgacgaggatatcgcagagattattgcagcgttgacctctttctttctgaatttttgttcttgtttttgtttttgttttttttgtttttttttccacaactcccatgttttgtgaatgcgtctctttgagattagcgtgcaggttgctcaactgatggagctgaagggtttatagactagcgtttaaaggacttagttcttcatggaggttgtctagggttttaacctttttcaatcaactaaattgtcgttgagaagaacgtaccaaaatgtgactgttattcctgccttaatcaagtaccttcgtgcactcagtgtaattatcgtgaaaaatggtgttcatctctatatgttattggaggtttggtagcgaaattgaatctgaatttttttttttttttttttctttctcatttttctgtagagatgtgggatattgtgtaggtgcgaggtgtcaagtacaggccaccgggtactgc

SEQ ID NO: 116378 - DNA, 668 bp, Physcomitrella patens
  Intron number 1 from transcript Pp1s31_110V6.1 (locus Pp1s 31_110V6) derived from phytozome v7.0 (chr-ID scaffold_31; pos 584398 to 585065)
ctgatcgaggtgaacagcacggtacgatttctctagggttttgtgtttgtgagacatttttgaagacggtgattggggtctttttgattctcggtgatgattctccgtgtttttgtggtgggtttctggtgagcccagtgatcgggtgctttgtctagtttcgaggaagttttattctatggatttagctgtgaaacgttcaatgtgtgtcactggcgctgggtgtagattcctagctcgctagctcaaatgagtctgctaagcgtcgtccattgtcgttatgcgttcatgcatgataatgtggtgaatcctgttggattgaggtttgcattctttatctttcattgcgcattggttcgatatcatgaggcgaatggatttcttccgttctatgtaaagtagaagctactattaatcatattgttggttgtactcctacgtctggaaaattagagacgggggaaaaaattagtacaccatctgtaataactccgaacgcgctggcatagtaaaagctatgtagtatgcgatagacccaggcaattttacagattctggagagttggagttattggggaccttaggcttttgaagttttgtggtttctactttcgactttaatttcttttcatgtgtgttaacaggtgactgacattttgaattaaaga

SEQ ID NO: 116379 - DNA, 570 bp, Physcomitrella patens
  Intron number 2 from transcript Pp1s25_380V6.1 (locus Pp1s 25_380V6) derived from phytozome v7.0 (chr-ID scaffold_25; pos 2573558 to 2574127)
cttcttcgtggtccaattcaagattcagcggcgaggtatgcacgcgcttttttcgtcttctacatctaatcgttcatgcttacaatgaattttgaattctcggtcacgctcataaactattctgaagattacatttttgagcagaggcatgtattcaatgctgctcatggttcgaaaacttcgataataatgtcatgtttctataattttcggtagaaaattgtcacccccagtttcttctggttgtgggcgcataattgtacaacctacggatagtgctccatgttatttctagtaagcagtacccagttgaatctcgcttcaaaattcagggcatcatcaatatgagctgaaacaaccaaaacgtagaatgctatgaggtgttaatatatgtcctagtccactccgagttttttggttatcgttgcgtgtatacaataacttgtgataaaagaattagaaattaacgatagtacctgtagatcagttccattacttgccgttgaaatgaaaatctcccttacatcttgttggttacctttcaggtttgactcgtccaaggtcaggact

SEQ ID NO: 116380 - DNA, 584 bp, Physcomitrella patens
  Intron number 1 from transcript Pp1s52_78V6.3 (locus Pp1s5 2_78V6) derived from phytozome v7.0 (chr-ID scaffold_52; p os 866571 to 867154 reverse strand)
tcgaacgagggggtgaaagagtgcgagagagagaggtaggagagagatttatatttagtagtttttgtgctttggagacagttgccagtttggtttattagtccctatctttcccaagtcgtggttgggtctctcaggcaagccctaattgtggtttgagctcggatgagccgtgacttgcgcgggctcatgtcgctggcgggcttgtgagttattcttttggttgtggctgtttggagtaagcgtgtgtgttttcttgatgctacttcgttctcacgacgtttgagcgtgtggtgtcggagtcgactgctctggattcttcttgtgccagttttccgtaatagacgaaatgagtgggtttgtaatatggcggagattattgttagcagagtcagggattgttgttttgagcattgcaatagcaagtcgcgcttcgtgggatcagaggtcgaaatagagatggtgttatttgcgcagaaactatttacgtgtggatgtatgaatttgacttcggttacgtttgagggttggttttcaatcgtcttttgcatgttctaaaaaaaatcttgcagttttgttgacaa

SEQ ID NO: 116381 - DNA, 369 bp, Physcomitrella patens
  Intron number 1 from transcript Pp1s371_2V6.3 (locus Pp1s3 71_2V6) derived from phytozome v7.0 (chr-ID scaffold_371; pos 25545 to 25913 reverse strand)
acgaaggtttgttatgtgttcctccccgttcaagcatgggcattggctcaggttttgtttcttactgctgagcagtgtgatagcgtttctcaagcaagctgtctctttttcttgggctggggttctctgcctttgggtcgctgtggtgccgtaatagtggattgtagtagtacacgcattcagtccaccgtttacggagtgtttttgattgtagttttctcctctgtaagacatagacgtatggtcgcgttctaattttgctcgttatgtgtatttctcgtcgctggattagagtgctttttttgtttggtttctgttttaattattagtcgttctcttctgcaggcttcactcccagagcaatcaaac

SEQ ID NO: 116382 - DNA, 926 bp, Physcomitrella patens
  Intron number 1 from transcript Pp1s98_66V6.2 (locus Pp1s9 8_66V6) derived from phytozome v7.0 (chr-ID scaffold_98; p os 361402 to 362327 reverse strand)
ttgcagatctctctcggtgcctccgtcgctgtgcggtacttgttcctcaccgcttgtttctgtgtgttcttatttcaaaccaaaaaataataatatgcgttggttttgagcggaggacgcggttgtagtagtgttaaggcgccagacgtgtcctcgagggttggctggctgtctgtgaaggaggcgaagtgccgggaagcttgtaaaggatcctacagaagtgagattttgcggtagtcgtcttgaatgggttttttttgcaggatgcgtgagtaggattgccttgcaattgtgatagaggcgattgaggtctcatcggtggtgttttcggagtggtcatgtggcgggaaaattagtatggtgcacattttaggggatacttgttggcatgtttttttgtttggacttcgtgcacacaagttgtagtttgcgttagagcaagcgttggttttgtcgccagaacgtgcgggtttttggtttatacttggcaccagtgttgtagttaaatgtgtagcacaagtgtttatcttctttttgtctttttttttcttttttcttccttcaggtaggtctttcgaacggggataatggtgtaatatattttgaagtatttatttatttatttatttttatttgatttggtcaaacttgtgcttggagcatcttcaatcctctgtcatgtggcagtttatttgaagaactcagagctgtatatgcgtgagtagagttgaggaggggtatgatggtttttgtcgtggcaaacaattacagcactttaccggttcaccgtcaacacttagttcgccattttgtattttacactacctgtgtaatcatgtgttgtgcagtcgtaagtatgttaagcagagaaccaggatataatattcattgcaaattgtgtcagtgcaggtgatcacattggctgc

SEQ ID NO: 116383 - DNA, 568 bp, Physcomitrella patens
  Intron number 1 from transcript Pp1s1_141V6.1 (locus Pp1s1 _141V6) derived from phytozome v7.0 (chr-ID scaffold_1; po s 854203 to 854770 reverse strand)
gctttgccgcaccttcgaattcttctttgcttcacgtatgtaaaatttcctactcttcttactgcaacagcttgttttcacaattttttcttagcttttttagctgaaaatttgaactgcagtgacgatgtctgtgtctgcgttgggttcgaccggttgaaacgctcgaattacgctattctggactcttatttcggtcgtttttcaagctgtaattaatccacgcaataaatcgcgcgataacttgtagttaaaatatgctaagataggttttgaaaaacctagaaaacgtaggttttagaggtttgctttaggtagttattggattacagcatgagctgcaaaggttctcttatgggcattattgtcatttttaattgtcggttggtttaatcgtgctaggataatgtgtgaattttaggttttatcttcttggttctgcggtttgtttgtagtgctggcttttatgtttaattgtatctgattgtgtactagtttttgatatgctaagagatgtgtttctagtgttttgaatcatgaaattctgctgtttaggttgaaattctgg

SEQ ID NO: 116384 - DNA, 1062 bp, Physcomitrella patens
  Intron number 1 from transcript Pp1s249_5V6.1 (locus Pp1s2 49_5V6) derived from phytozome v7.0 (chr-ID scaffold_249; pos 12381 to 13442)
agcttggtctatttgttccatcgttccctccaaaggtctgttctcaaacttttcaccatttctgtagtgaccaccttcaaaaaaattgatttgagatttttcatgaccccaggcttggccatgttgcttgcacttaacttgaggatatgacagcgcaacgtccgcaaatgcatgaataatctatcatcagctcttgaaatttggacttcttgaactagaaatgatgtactccaaaactaagacctctaaagaaaatcaagcttcagcaaaataatattcaaaagtaaacctcttgtacatttagacaagttctgtacattattcacaaatgaatttccgcaaatcttttacttgacagaatcaagaaagcttatcgcagtgcaatgtcctttatctcttttatctgcatcatgcatcaatgaatgaagacgtacgcaagaaacaccacacggtaagactaggcaaacgttaggctaggtgtgtaagttgaagctaacagtagacgaaatgcattaacagagtctaacgttgaatcggctccagctaatttgaatccataaacatctatattgggcaaggaaaaagagggattggaaaagcatttagttaaaaaaccaaaataaaatagactaaacacacagaccacaggcaatgattaatgaacgtgcaactagcttcacaatggtcaaaatggatgtggcctggagcaaccactctaggcaggatttcctcttgtgctgatgcctcttcttcctcttcttcctcctcggaagtttcagattcgctggtatcgggtaacttagtattctgtctgaaatgccttgatatcatccttccttaaagatgcattattctgcaattgtaaatgcacatcgttagcatttctaagtagctacataggagaataggatgtctcttaaatcaacttacaagataatgctagcatgcaaaggcttcaaaagaagccggtgaaaacaattttccaattcatttctaatcaaaatcttctatgttacaataatcccaggaatattcaggagctgcgaacaaaaaatcgatcag

SEQ ID NO: 116385 - DNA, 998 bp, Physcomitrella patens
  Intron number 1 from transcript Pp1s249_67V6.1 (locus Pp1s 249_67V6) derived from phytozome v7.0 (chr-ID scaffold_249 ; pos 367382 to 368379)
gtcttacagcaaatatttcaaaatcgccttcgaaagtgagagtctcctacttctaacttgttttctttttctgtagtacggttctgcttagggcttgtagcaaggctagcgaggaattagatccgttccacgaatcggatttatgagtgaaagacattttaggaatttatttggaaatgcgctctcgattggagctccaagatgtttctgagattatgatgaaatattagttggaggtttggtctcagttgttctaagtcggattcgagatcttctaattgtatacgatcccgggttgatgttcagtatttgatttcttgatgtactgccaaaatgaagatggttctggcaccttcttttgtcacattggctgcgagtcgtggattgatggctcaatattagcttctccttagatcttcagcacaatatctttgaagcggcttgtcgcaaattaacggcattgtcttctctttcatatgttcggacactttcttaaatgtttgatgaccatagcattaattaggggtaattagtagaattggatctgtaaaggatgccgtttggttctggccataatcaccgtgtatctggactcactaaaagaaattttaagacccattatcaatttcttagtagcagaaattgaagatagcaaggttcttgtaatattttgaatagaatttggagcagtcgcgtagagcagtacattcaagttttattctgtactcatttaattaacaaatagaattattaatttattttgttctttatctgtggagttggaacatctcactcttactgtgtacagtggaattgaatgtagaaattaggagcgcacactttcatcgtaataccaaagtttgaagatacttgttttgattatcctcactgagtgaagtttagatcgcacatgtaaatcttgtcataaaacaaattcattgatgttgtatgttgtttttgtagtacggagaagttagcagaggttgacttccatatcg

SEQ ID NO: 116386 - DNA, 878 bp, Physcomitrella patens
  Intron number 1 from transcript Pp1s183_113V6.1 (locus Pp1 s183_113V6) derived from phytozome v7.0 (chr-ID scaffold_1 83; pos 866907 to 867784)
gaggtcttcttcagtttggttctggtacctcagaggtagggcactgtgagtattggtctgtcttttttctagttttgttgttttggtgtaattagggttatgaagatggatctggatgctggaaccgttgcctccggaggattggctgtgtaatttgatgtgtttcgcggagtgcgaactcttaagttcattttatttgaaatttctgaggaaattcgtttagctcggtgtattggcttattgtgatggtgttttatgaagcttgcagcaggacactgtgttgtgattattctgaacggtagtctctacttattcaggctttcctatcttatggtaaaataattgttgcgtgaagcccgcatggtgaataggatagaatcacgatgagctgaagaagtgtgaatcgttttgctgacgatgtgtgtgagttaggatcgtcgtctcccctatggttccacttcaagggcatgtcttatgttaggttgcaaggttcattgtaatatgttattttagccggcaggtcgaggtggttttataaatccttaatgcctaccgttctgtgcagagtcttcaataatatgtagtttagatgtcgttcaagttatgagtcatgcgtctgatgagtaatgcgtcattagttgcttaagactcctgtttcactcaaatattatgacgatagaatatccatgaaattttttttatcataaaagactctcttccagaacgagaacttaaatctttacatttattttcttgatgcattgtcctgctgtaatgattgatattcctatttctgttttatttttacttagatcgcactttggtttcttcgctgtgatacagttgttggagagtgcattcaagaaagaaacagtcgg

SEQ ID NO: 116387 - DNA, 864 bp, Physcomitrella patens; identical to SEQ ID NO: 114936
  Intron number 1 from transcript Pp1s119_48V6.3 (locus Pp1s 119_48V6) derived from phytozome v7.0 (chr-ID scaffold_119 ; pos 320675 to 321538 reverse strand)

SEQ ID NO: 116388 - DNA, 947 bp, Physcomitrella patens
  Intron number 1 from transcript Pp1s34_56V6.5 (locus Pp1s3 4_56V6) derived from phytozome v7.0 (chr-ID scaffold_34; p os 329996 to 330942 reverse strand)
gaggctctgattgtgtaccaggagggtattgcctcttacgctggaatttgcgaattgtgtgcttttgaatcccgctggttcttccgcccctgctttcgctttcgtttttctcgtcctggattgtaggggaagcgtacactggaggttagtagattgcgtcgcaatttgtgttacttatagaatgggtttgtctcgtcttcgtaccccgtctgcgtcgcgcaaggagattcctcgcaggacatgtgcgacgggtaagggcacttgctctaaccgtagtgacgtcgttgtccactgatttgtatctcgtgaagcagttgaaagaatgacggatttgaaggatctccttcagaggtcgagcatgggcaggagttgcctgtgttgcagctatgtttgttttattcagctgtagctctctgcacccccacgagaaccctcgccctgctcgaaattcttatttgggcgccatgatttggcttgcaaatgatgtcgtctagttgtaactctctgtcttcgatgcacactcatcattcctttcgtattgtttttgtcttttggtttttgtgttttgtattgtttaatcgtgcctacatctatgaccttcctgtgccactcagtcagactgagatcgaaaagattttagcaatgcgacatggtcgggagtttgagttggtaatgaatcggggtgattttaacttgttttagagttttggcgggcattcatcttcttcaatacattcatgacccaacaaccggtactcgttggtttggctcaataattatattgtgaagctggaatggttctgagcctgtgccaagattcccacccgcgatatggtgctgtatttctccgaagttgttcgtttctcattggtttcagtgtaggcacacttatctccttgtgcgcttgtgcaggtgcttttagtttgcaagggtcgagggttttcagc

SEQ ID NO: 116389 - DNA, 449 bp, Physcomitrella patens
  Intron number 1 from transcript Pp1s86_57V6.1 (locus Pp1s8 6_57V6) derived from phytozome v7.0 (chr-ID scaffold_86; p os 535680 to 536128)
tttggtgaagctcacggggtgcttcagaccctccggtatgattcgaagacaatcaattaccccatctttcatgtgacctttgctgccgctagggttttcgttctacgggtgaggcagatagactatatcgatgttgataatgtcttagtttacttgcgtagttactgagcctctgatcctttcgatttgattggagcggcgtgtttgtagttttcgtgagaaggtgaacgattgtattctgttttctttttttcttttcttttcttttcttttcttttcaatcttactacgatttttgggtttggattaagggatagggggtgtggcgagattgaaagaacaggttcgtggaaataatttagaaactgaggatttctgggtacagagttcaagtaggagttgacggtcccgtgaaggtgaaccggttgattggtgatggttgattgcag

SEQ ID NO: 116390 - DNA, 1046 bp, Physcomitrella patens
  Intron number 2 from transcript Pp1s124_79V6.1 (locus Pp1s 124_79V6) derived from phytozome v7.0 (chr-ID scaffold_124 ; pos 607172 to 608217)
aagaccaaagttttggaatcgtaagttccttcgaggtattgcaagaatcctcaacttgggatggaaacgtgtcttcggttcgctgcgtgtgcgcactgcacctcctcttttctttttaccttatgaaattttgcacatgttgggatcgcctgctgcgccatgggaataatcacattgtcattgtattacaattctcaagtcggaacctggaagtacggttgaactcgttaatcgagtgtcgctcgccattctcatttcgactgttgcaataccagaaatgatctggtcagacctagacgttgcactgccacttggtcagtgtcgagtgcgaagaagcatgtgttaaacacggatggatcatgtgaggaaacttgaatttgacttagattgcaagtaatcaccctcatcagaatcctactctctctctctctctctctcacacacacacacacactctctccctgggaagtaaggataagcgaatttgctctaacattcaagttggccgcacataatctcttcacggtgcgtacaccacttggaaccaacggagatttcgtaacaaaaaatgattgctttgttgcctcagatcgtataggcaccatggattcgaggttctgtgggatggatctcttcactatatctcttacatgcagtacgattattgatctactattgtgtaccttcaatggacgttagcgcaaagaacttcatgagttgatgctcgcgtacatatagctgtagactcaatgacaatcctcaataggtcttagcagaaccctggaaggttgatacacactattagaagtttgcatgatgctggcggtcctccatccgttctcactgcgctcttcaggagagcggcatttacacactccttcatgcgccagctggggaattcaccacggatgggacgtttctagagtgtcacctccattcattcttaatatatcagcctcatgaattattccggacagtgtagccaagatttaacaaccggttcacatacaggtaagaagagcgggtacgattcaaccaaagagttg

SEQ ID NO: 116391 - DNA, 857 bp, Physcomitrella patens
  Intron number 1 from transcript Pp1s362_1V6.1 (locus Pp1s3 62_1V6) derived from phytozome v7.0 (chr-ID scaffold_362; pos 16435 to 17291 reverse strand)
aagcaacgtgtgcacggatcagggagcatctcgcggtgagtctcgccttgctgatcatgattgtggcatgcgactcgaattcccacgaggatttgcacgaactccctttgaggtttgaatttctagttttgagcggacttttctctctgacaggatttttcgaagaagcgaataactattgggactaccgtcaaggacctgttaaaaggatttgtccagggattctatgcatgaatttcattagtttccagagatcagcactgcaatgttgcaatgcgtacatgtttggcgtgttgggtgcagcaaaacgccttggctcagatcgtagcttgaggatgctacaggaagcgtaaccttgttgtggccacgtccagaaacccgcctcacagcgaaatcagagactcgaagaaagacattctttacaataatgttttctatactgcctaaaatgatatgcataagcgctacaaactaggttttgctcaatcgcatcaaaggttgtagaattttgccctcacaaaatcactccgatagtgaatattaaacttgttaccagtgttaaacgagatttcgtttaatattcaagacatgctgcgttagaataaaacactcgcttgcgagtttcgaagtctagttgaaaacttcaaattgatctgcctcatcctaaacatgacttacataaaatatgcaggtggctacaaaacggcaattttattgagtaatacatctttagaaaaaagttacaaaaaaggacataaaaaagaagaagaaggtttgtgcgtaaaaatcgacactcatgctactgactcttcttttctctaggtcaatcttgtctttgacgaagttcaacagagtac

SEQ ID NO: 116392 - DNA, 653 bp, Physcomitrella patens
  Intron number 2 from transcript Pp1s31_210V6.1 (locus Pp1s 31_210V6) derived from phytozome v7.0 (chr-ID scaffold_31; pos 1122420 to 1123072)
agttgtccagaactggtggttctgcgtaccccgaggtgcgggcctctcaaattgtgtgatttttggtcggcgttttctaatccgggtgcactttgagttctttttgttgtagttggcattatagcttgtgagaacaaccacgaccgttcagtcatcaccggttatcctgtcctgacttgaaactcgctaacattccaacaagtttgttggcattgatgattatttggagtcgttgctgaggaaatcatttgatgtattatctgcttgttcttctctggacagttaatacgatggcggcaggttgataactgattttctggttctatcatattttagggttccaggatggaagcttgagatagtctgctcacttgttcgaactgttgttgcattggtagattttgtttttcttttgataagtctgtgaatcttcagtagtaacaacgatctgttgtcattggcttcgtgtattccagagtggattacctgatatacatatgtttaatacagtacatccatttttgtaaacttgtggttgtctcattgttggcagtttacaatttaaccttctttatggtgtcgaaagttgaagagtgacaattcggttcatcgctgcaggtgcaacagaggctacttttactcctggagaccgc

SEQ ID NO: 116393 - DNA, 863 bp, Physcomitrella patens
  Intron number 1 from transcript Pp1s179_57V6.1 (locus Pp1s 179_57V6) derived from phytozome v7.0 (chr-ID scaffold_179 ; pos 863929 to 864791)
atccagtgcggaaacccatcaaactgaaggtcactttttgatttcttgtccttgtattttacatttctttttttggctggttgtgacgtgcgctagatttatcaatgaagagtattatctagtggtgataaaaatggatattcactattcaccaacgcaacaaagcgccacacgtcctcaaaggatattgtcggtgatgaatgcaagcgagttttgtgcgtcgatcaccaagcaagctctgccacagtgaactgataatttcccaacttgccacagcgatttcggaagtgcatcgttgtcctgtcgatgcgtacccagggttggtaggtgcacaagtccccgaattctggctttgatcaaggcaacggatattttaccgatcccaccccacggccgtatccttgcaggattgtccatccatcggtttctgacatgtgtatgtctgtgtgtctctctctccagagttagttcactgtttccaggtcatctgcggttagcagtgatggatgcatagcgatataggcttgggcttgggcttcgtcttcgtctctgacctggaacccagtcccagaggcgaagattctgcaccaccgtggcagtcggccgggtcgagagaagaaggatggaatcggaaggcatcgaggtcggccacggctcgacgcagagactccgcatccacgacgcataattacgtcttgaaaacgaaaaataatatacatatacaagaaaatataagaacacgcgggcatccagttgccgactgctagaggcctagtaatagacttacgtcgcccctgatgcagttcaataattatatatcctgacgcgcggaatcttatgttgtcagggtgacgtcaggaaga

SEQ ID NO: 116394 - DNA, 438 bp, Physcomitrella patens
  Intron number 3 from transcript Pp1s86_210V6.1 (locus Pp1s 86_210V6) derived from phytozome v7.0 (chr-ID scaffold_86; pos 1356014 to 1356451)
tctctcctggccttcgtgcagtcaaatttgaccgggtaatagtttcttccatcataccagcttctgttgatacatgtttcatgtgcgttgcccttcgtgaacttgtgaagatactaaaatgtggctcgtagttgtacttttttgtcaattccatggaagaatatgaacagagaaagtaacaattttgttttgatagattttccagataattgttttgatagattttgcttttttggagtatagctcgtctcaaatgctggcactccgtacctgatatgttaaatgttctcatttgaaaaataattactagtatgaggagatttgtccgcctcgtatttctgaactctacagcgatgcttatttttttagaactctgactacattattatgaatcgttggacagacctcaagtgggaggatcggccatttcggcaaata

SEQ ID NO: 116395 - DNA, 810 bp, Physcomitrella patens
  Intron number 1 from transcript Pp1s68_28V6.3 (locus Pp1s6 8_28V6) derived from phytozome v7.0 (chr-ID scaffold_68; p os 126036 to 126845)
acgcttattgctggaggtaagactatccaaattgttcaagtttctccgaagaggctgatacagcaacaaacatctaggtacctgacctcgacaacacttgcatgtgaaaaagtttgagattctagcttcatagattgctttccctcctaagcgaaagcagtcaccaaactgaacgtaattgcgatttggttcctcatagccgacacagctaggtacaggtggcttgtgagcatgatctactacaaatcggtcatgaacgtcctgttgcagctttgataattgtgagtgctgcaggctgtagtccgcccataaagcccataaaaagtcagccttcaaagcgcgaaaataatttcaggagtatcttctaaagacaaagatacgaggcgctagctttaaggtttatttccaacaattttaagtctgaggtaccacacctgatagaaacccctgctcattttcttgagaacgtgcaagaaccggattagacctcttagaatcttggggcttctattcgaattgaattatcaatcttcgtgcttagcaacagagcgatgaaagtttggataactcgcttcacatatggaagcaatcacaagagggttaatttgaaataatatcgtcaaatggaaaatgtgttgccgcctctgttcttgggaggactcttcgaatgacaccattctctgtacgtcaacatgaattacattggcaaacttacaaagaacagaatcctcgacatatcgtgtcacagaactcatgaactctactgattaccaacttattttttcgacacgttgtcattgcagtcttcaa

SEQ ID NO: 116396 - DNA, 826 bp, Physcomitrella patens
  Intron number 2 from transcript Pp1s245_73V6.1 (locus Pp1s 245_73V6) derived from phytozome v7.0 (chr-ID scaffold_245 ; pos 378660 to 379485 reverse strand)
ctcctcctgcggcagagtggagctgtggcgatcaagtattctcttcgcagtttttccttgttcttagtcttgagcaaagaagtgtcgtggttgacaactcctgcgttaaatcttcattctctcggctatgtaatttgagcggtgatctgtggattcaggagccatctcgatggagtgcgtggaactgaattcgaattgaggtatttgctgcatgcgattctagttgtagaattcacaactcaccgagcttgttgctcgttcttgcggagtaaggtgctttgggagattgtctaaggagaatgagaaggggaaagggagggcgttagggggtcattgcagtgagtggtcattctttacgataggtgtgactgcggggtattcttcataccgtaaagtgccataggagagcatccttcatttatatgatcaatgtggagctccaaggtttgggatgcatgtctaggtgtgctttcctttgtcgattgcgttgcagcggctgtattacgaccaaatttttattgttttttgttttgatttgattttatttatttattatcttattttgattttgatttaattaaaattcgtcttttgacaaaaattcatctttaaataatattttatccttgaatcatatttcatatacatatttcatctaggtttaaagattcatcctttattgaaaaaattcatccaaattggttcattcaaaaaactctaattcaatttaatcctaaattagccctagtacgaggtctttcctacttacaaaattcttgaagatgctctcttggagatgttaacttgaacgttgtgctggtcctag

SEQ ID NO: 116397 - DNA, 707 bp, Physcomitrella patens
  Intron number 1 from transcript Pp1s98_83V6.1 (locus Pp1s9 8_83V6) derived from phytozome v7.0 (chr-ID scaffold_98; p os 454850 to 455556)
aaaggaatactggacaacttgacaggtacatgtttctgcaatatcatatttcgatcatccctaaaatcacaatgtgaaatatggatccatagtttcggcactttgaatcacgagaaatgtaaagtgtgtaacttggcgtatccgaaggggaaaggcggatgaatgttgagatttttatctttacttgtttttggtttcgtcgattatgtcataatagtctccttttagtgatcaccgtcttttctaatctgtcaaatgtggtcaacaattatttcgatggcaccatgcctatgttagaagtgagagacaccactttttagagatgagaagctcagacgtggttcacagtaggatgtgcgtctaattcaacgatttgtgcaacttatttatcggatttattcttagtgggaatatgagactggtgcttcttctcaatcctaaatgtcagggatcatttgatttggaaaattccaattgtgttacaatatgttaacttttcgaatctttgctcacagacaacctttaagctgttcactcaatctttttttgacggcttaattttgagaggagtcatgggatgatgcattttggatttatcgtaatgttagtaagatgttttgttaatgataagtaatatcttttcctagagatgcctaacaagcttgactagcttttcaggtacaaaagaatccatcaaaggagcaaaa

SEQ ID NO: 116398 - DNA, 980 bp, Physcomitrella patens
  Intron number 2 from transcript Pp1s96_51V6.1 (locus Pp1s9 6_51V6) derived from phytozome v7.0 (chr-ID scaffold_96; p os 324889 to 325868)
aggtctgctttcttcacaactgtcaaagacgaggaaagatatttctttgttcaatactgttgcgattttcccttaatttatggtataatgaagaaacaagttgggtctgtatcaatgggaggggaatatagtgactacgtatgacgagactactgctggaacattctaaagaactagtacatgaagtgaatggcctactgcttgtaggaacgcgtagatacaggggacaacctgattgctgtcggctctaacacgtccagtgagattatgtcatgtagtgttttctgtaacgatgagatttgcgacagtgaacctacgatcagaaaaatttctgaaggatgtctgcatgtctgcatgtcgtagcgtattcttgctgaatgctggtagacaaccacatttttttcgtaacataacaataaatcgttcagaattcattcgtgagacgaagaatgtcatcacgatttctgtgaacgcttggtgattttgtagtgaatggatgttactattatcctcctaatctaacttttgtctgagaagatcgtgcatctgaagttgctaatttgcaagattgtttagttacacttggaatccattccacttaaactctttgtgcatgattcgaataacgaactagaccttgtttctttactcattttggtgtgttgcgattccacatgtcagccactagaatcacaatgcatttgtatgtactctagaactgcaatgcaaggctttgtttttctcatttgatggtcagtcttggcatactgaagaagttctcttttatgaacacgattgcctattaataagcttttaaaaactttaaaaactcgtatgaggttcaaattatgaacttgtccgtatcaaaattttgtattctcgttaatgtgctcacatacattgaaaacatttttataattattttttattgatgtttacttctctaattttgtatttcttcagagggtctagaacatctg

SEQ ID NO: 116399 - DNA, 971 bp, Physcomitrella patens
  Intron number 1 from transcript Pp1s344_7V6.1 (locus Pp1s3 44_7V6) derived from phytozome v7.0 (chr-ID scaffold_344; pos 88192 to 89162 reverse strand)
aacatcacgcttcgtcgacgcccacgtccctggaggtaagcggcaagcgcatcaatgaacgccgttggcacacgtccacgtctcttccctttgccacccatgcaatttgcgtggtccgccgctgctgctgctggttatgggtcctgtctctgggtctgatgttttgttgcgaactgttgttgtgatgaggatattcctgaaaggtggaaccatttgtggggttttgttgggtgctgtgcattgagcggcatgtcgtcgatgctatcctcttcctctcttggtgtgccatatattagttttttccttaatctagttgaggttgtggtggtgtcctcgtgtggtaggagcatatttgtctgtgaagaaagtggaagggttttatttttctggttttgattttttagggacaatagaattcgtttggataacgaacctggcaaagtaagaagtgcgatgggaattttgatgtcaaacggagtcaatgtcttgccttatcgttttcagagcttgcagaataggcgctgggctcttgtcttcaacttgttataaattagtcacaaatgccttcgtggatgagttgtccttttgctgttagtactgtcacaagcgccgcagggtttgagagcagaccctcgtgggttgagggtcactatgtagtcggtggggttagagtgtcaagactctgggggtggccgtcataaacatctgaagcatatatctttatcctgtgtgagtcgccaaggttgtagttgctggatctcgatgtcgtttatagtagaggaaacgcggtgtggttggctgcatttattgcaattctcccatcggtaatattagggttgtcatacgcgagtgcttagagtgtggggcaagtttggagtacggagaagtggaagaggtatgttctctgacgattgaggaggtgtgccttttgagcagatcggatttacacctctgcaagagcggtattggga

SEQ ID NO: 116400 - DNA, 937 bp, Physcomitrella patens
  Intron number 2 from transcript Pp1s57_138V6.1 (locus Pp1s 57_138V6) derived from phytozome v7.0 (chr-ID scaffold_57; pos 1027398 to 1028334)
ttttttggtgcaggccctttctctgaattttctaggtacataaattcatactgccacctggaccttctttgtactcgtttttcttagcctagcaaggctacagtaatctctttcccttacattgggggttgagggatagccatgtacgtcggattttcccccttcaagagtttcagtgttcaatttggacgtgaattcaaaaatttgattttcatggaaagaatttctgcttttatttcggccctgtttttgaaagctttaacgtcgatttgagaagcttatcacaaccttctgtatacttacggacttttttcccacaatggttgatggaagtagtgaatatcggtgtagacttaatgccagaaggtgaacttggagtcatttgaataaaaactggatgcctgatcaagacgactattgtgactattcaaaggaaacaagtgttccgaaaataggcttgacttttcaaagacttatagtgttgtgatgctactgaggaagagtgatcatgaaaattctttgaaatatgcattgtgagatacgttcaaagttccataaaaatgttgatgacatgcgatcatgtttctaccagcatgaccagcagctgagctttatatatattgagggtgtttctacattctggcatttaaatcgaacctgaagtgaatttaagagaagaagtgctctgtttacccagacttttttttcataaagctaaggtgctccagaactcgagaattcactattgccggacgtactgcaaccatcaccacttcctaagaattcttccacgagacgatttgtactgttgttagtaatacaaagagaactaaggcagtatcgtataaaagcattgagttgatcatagacacttttgattatttgggccaacttgtgcattctcaaaatgaatgtgttggcttcgcagctgccacag

SEQ ID NO: 116401 - DNA, 617 bp, Physcomitrella patens
  Intron number 2 from transcript Pp1s14_455V6.1 (locus Pp1s 14_455V6) derived from phytozome v7.0 (chr-ID scaffold_14; pos 2966692 to 2967308)
taacgcacagatcaggtaagtatctagacactcaaaggggtggaagaccttgaccacatcgggttaacgttttctaattggagagaaatttgagtattattaagcttctcgagatctggaacttcgaaaccagatggcgttattacatgtgggtttgcgtgccctagaacgtacaaaagaattctctatcacgttcgagatttccaacccatgacgttcggtgaagcacagcaggaaagtgaaagaagtaggaggatgataaccgtgtaaagtctgcaagccgagccggaccaagctcaggccctggaggtggcaaaagatgtgaagtcaaagtaggcaacatgccgtgaaaggcgagggaagtgaacaacgaaaccggaatgggagcatgaagcaaacagtgtgagcacttctcactgcgacttcatggaggtgggctccctggggcatacacaactggactaggagaagcaaaacagagcagagaatggagaagaattgaagaagtgaggtactcgtttaccgactggaacggtgacagagttgctgcgagttgcttctagtaacgaggttttgtttctcgataacgaggttttgtttgagaaaaaggacaagag

SEQ ID NO: 116402 - DNA, 395 bp, Physcomitrella patens
  Intron number 2 from transcript Pp1s149_292V6.1 (locus Pp1 s149_292V6) derived from phytozome v7.0 (chr-ID scaffold_1 49; pos 1018592 to 1018986 reverse strand)
gatcataggaggccatttcttcagccgccgcggaggtgaagattttctctcttcctggctcatgttcttatacttgtcttccttcgaactgtagtgacattagctaattccaatttcgtgctcgctgttgacgtgcagtgcaatattgactgagtgtacgaaaactctttgaggtttgattgtttctgcacggattgtaatttcgtttctgatatttacgtggaatacacatatatttatatatttatattgtaatctgtatagctttaggtttccagactcctgaccaagtttacaatagttgtgttaatatcctactttgcttttgcaactctgtattgtgaataattatgatatgtcatgtgctttggacataggcaggcgtaccggtggcg

SEQ ID NO: 116403 - DNA, 833 bp, Physcomitrella patens
  Intron number 2 from transcript Pp1s395_35V6.2 (locus Pp1s 395_35V6) derived from phytozome v7.0 (chr-ID scaffold_395 ; pos 184893 to 185725 reverse strand)
ccccagtggctccggagattcttccaatctaactcgtaagtatcagtggagaaaatactttactctttcggttacagtattaatcgtcttgtattgctgttatctcgaactccattgcattcaacagagaattctagtcttttcttttgtgggtatccgtcatgcttattcgtgtaaaggattgaacaaccttcagcatagttgtatggcgatgagttgaatattgttgcacgagtcgacaagaattttcgtcacatgatctctccgccgggtacctttgtttcttaataatttcatatagacgttttgtctaactgtgatagtattattcttcagccactatgacttctacaatcaatttgttccctgatagcatgaatgacattgtggtatgaggtcttgtccagtagtacttgggtttagctgaacaaagggggattccatctacaagggaatcatgatctcttagtccttaatgccctgtttttttggacagcttctgcaaaagtatttcaatcgtgcagtgttcctttctttagtcattttttgacaacctagtatcctgaattttcgccttcccagctgctagtggtttgttatgttgagccgaattacggcgtcacagagactccgctttagtactttttttttaattttagggtcaatatttgagttagaatgtcaacatgcagagtccctgaaggtcaccccagtctaatctcattctgctgccctaattctaatgccgtcccaagtctgactccgtgatgatgattctctgtggcgctgtttgtgaagctcccacacctcgcctggcagagacgtcaacagct

SEQ ID NO: 116404 - DNA, 392 bp, Physcomitrella patens
  Intron number 3 from transcript Pp1s172_96V6.1 (locus Pp1s 172_96V6) derived from phytozome v7.0 (chr-ID scaffold_172 ; pos 910423 to 910814)
ggcatcgatctccttcaagggaacctagtgctgatgtacgtgcctcatttatctcatttgattgtgggagtaagacaatcgtcattcgcttagtgaattccattgcctactgattcgtgaatgaattcattacgaatgttcgtgaaatatttccgtggatatatttgttcggctttggtattgtaatgagaacggaaaggtccctcccacctcctcccttctcctttattttttgatttatattttccttcctgtttttttcataaacatgtaaatataatattttaagcataacattctactttatgagtatctgctcttatgtactcgtgctttacagtaacaaatcttcttgattgggcaggggcgtccctctgaatctgctgagccag

SEQ ID NO: 116405 - DNA, 1059 bp, Physcomitrella patens
  Intron number 1 from transcript Pp1s55_89V6.1 (locus Pp1s5 5_89V6) derived from phytozome v7.0 (chr-ID scaffold_55; p os 558264 to 559322 reverse strand)
cgttgggagatttattcggctccgcaggtgcgatacagttttctttgcagccagtggatgctcttttgtgttaatctgagaatctgattctgcaactatgacctgacgttccccgcctgtgcgttgcttacgatgccgcaattggtatgtctctctctgtttgcaacaaccacctctacggagatcattcattgaacagagaatggcatgtcatctatgtcgtaaaactacgctgataattggcagatttggtttatcctacgggagttcttcgtgtaaatacaattactcgaacagtgtgatatgacattggcaaaaatgagaagtcgagcttctcgggcattgctgtgtgcgtactgcgatgtgtgttattagaacttagtatctttgatgaagccagtacgctagtgaagaattttgatcctaacgtaatttgttatcggaggtttgctggtaataccaggcaatttcatggtcacaaaaatgaaaactactgcatgattaaattgattgtccaatgtgtttggggttataaggtcggaggtgaagggatttgaactcatatcatggtgttgtcacacttaacaggatcattgcaaagggtagatagaagtaaaatcccgagcagaatgacagaatgacaatctaaagttgtctctcaacttatgctcctcagattctaatgcaactggataagtttagtttttgaattcttaactggtgatcatgaagttcgcggtttctattacggaagtgctatatggagtgacttcttagttgcccttacattgaagatagttctggtcaattttaatgtcatcatgcacttcacttgcaaacaagaaagtcgaaagtcgaaagtctgattgcattcatgtctttgcattagtgcaaataataataccccacttgaaggaatcctgagtgaacacccaagaaccaagcagtagttcaaattaaccttcatcatatatgaaacgagttacaactccttaattgtgtttgcgtaatatttgcattgcagtcttgctgcagccaagaggaggattgttttacgaa

SEQ ID NO: 116406 - DNA, 833 bp, Physcomitrella patens
  Intron number 1 from transcript Pp1s133_35V6.1 (locus Pp1s 133_35V6) derived from phytozome v7.0 (chr-ID scaffold_133 ; pos 241832 to 242664)
gtctcggtatgtccgaacattgcatttttcttttgcattcctcaattttcagtttccttctcgagcgtctactgttagaatttatctgtggagctctttttccaggaggagtctctccacttctgagacagattcatgacttggatttcactggtgacctttgttcgtatccgaattgtgtcggttgcctcttttttgtgctttctatgatcttggattcttgaatgctcgttctgccatgagcttgaaaacgacattctttcaatatctaagcgatatttccatgtcagcattgacgtggggcaaccaattatagggttttcggagttttggaattggatgaaaagctcgtttgtggatttctgcaaatccttcctcggtgctctgtctgaacgtctgcggaggattaattctaaatcatggccatagatatgactttcgtattgaggtcacagccgtgtagcactgccgaagttttaagcttaagctgcaactgataagctgggctattttgagttatttttagggtgtcatctgtcttatggatcttcgaaagcaggctgaagaagataaatgaatttagacgaattcaggttgattagactagataggtttgcacgcagatcttaccttgcttattaaccagatggtttatgctccatccctttttatcgaaggcagaattttctgttcggttcttgtactgaaataattttcaagagatttgaattttatccttgcgactttgctttgtcatggatattacctaaacattgtgtgacttgtttgaaatcttaccatgttaccatcttttgaatttggtgcagtcggcg

SEQ ID NO: 116407 - DNA, 519 bp, Physcomitrella patens
  Intron number 4 from transcript Pp1s29_222V6.1 (locus Pp1s 29_222V6) derived from phytozome v7.0 (chr-ID scaffold_29; pos 1448470 to 1448988)
gagagcggtgccaagggctgtgaggtacatttcacaatgttataattttttgattactgtgagcgattttgagaagtcatctactagtaagtcctaacatcacgagtagaatactagttatttgtgcttcgttcacaattctagtgtctagtgctgggggcagatatttcaatgttcttagaagtttgctgtatatattagtgattagaccaggttcagtatttttcagttgattgcatagcttccaaggagcaatgcctgatttggtatgatgcatatgagaggagctgaaccttacgtaaaccgattacatagtttgtttttctttttctacttgtgaaattcatttctagtttagtatctcggtaatcatctggtatgaagaagcatttgagtgtgatcatatgccgtgaagtagccctcgtttgtagaatatagcagaatgtgcgatgcttgtaacacaatcaaggggctgggtttacaggtcattgtcagtggaaagttgcgtgccgctagggc

SEQ ID NO: 116408 - DNA, 486 bp, Physcomitrella patens
  Intron number 1 from transcript Pp1s137_40V6.1 (locus Pp1s 137_40V6) derived from phytozome v7.0 (chr-ID scaffold_137 ; pos 179504 to 179989 reverse strand)
tcgagctgttggtatctggggcaagggtggagcaggtaagaggaagagtgaagttggttgtgagattgacattttctttgaaatggtaaatattttgaagtgctcaataatgtgatgtttgagtgctgaaagcatcgagcatcagatattctaagtggccaaagcgtcgagaattaggactagaatcatactcagggtcttgagttgctcatttgaaaccttcacgactcaatgcccaagtctggaataaattgagagatatgaggtttagatgagtaatctgaggattagttgtgaggattgtacttgatgcgtccttttgaaaatatatcctaaacctgaccaagaaactagtgcaataaaacaacagtgataaaaagaaacgcagtcatacgattaaatacaatgttgatattaaagattttcgttgtatatttttggtgaagggcaggcaaaaggctgttggcgcaacgaatacacaacgac

SEQ ID NO: 116409 - DNA, 652 bp, Physcomitrella patens
  Intron number 1 from transcript Pp1s206_83V6.3 (locus Pp1s 206_83V6) derived from phytozome v7.0 (chr-ID scaffold_206 ; pos 521547 to 522198)
tcgagccggtaatcaaatcgctcatgggactcgcttgtgatgtcttgtctcctgatcatcttttatgcagaatcagtgacttcttattatatttctgtttatcttctttgtgattttctgcgtgggaagaattggtaagcgttctgcgttgcttggtttgtgggaggaggtcaggagtgtaggagggcgattgttgcgatttgggtgggattgccgcttaccaggacttggaaggagattgagaagagcatatcctgagggggggcttgattgtagaggttgcaaagaggagtaaatagtagaaatctcgtggttgtttacatgctcatgaacggaagtgttaaacactgtcaatttaatcaacccaactcttttaatactgctatttcgaacgttgatttgattcttcacagtcgtctgacagacgaggtgtatgtggttgaggagggttgaatgatcaagtctttaggttgtgtggaacgaaaagaaatcgagtttatgttattgaattttgcgattctaggaaatacggattaccaagttttgatattcccctgtagttgagaggttcgacatatggatttgaatttaacccagattttgtaccttctgcacagcatactttccgacgccgcccaagcgaacctcgaga

SEQ ID NO: 116410 - DNA, 725 bp, Physcomitrella patens
  Intron number 1 from transcript Pp1s81_39V6.1 (locus Pp1s8 1_39V6) derived from phytozome v7.0 (chr-ID scaffold_81; p os 214408 to 215132)
gaggaggcttttcgggcaattgttatttgccggtaagaacttagctttacttcaatgcgtcgataaattcttattatggggttcacttttttctttttctttttctttttttaaagtgtggcgttgcttgcttgctcgtcttcgctgcaactggtgtctcgatttcttcttccgcctatttgcttgctttctatcgcagtcaatgctttggagctcggactattgctaaccacaggtctagcgttcgttttttgtatgttattttttctagttcaacggtggtcttatcagactgatatggatgagtgagtgacagtgttgctgctgcttcatgtgcagtaacttagtctagcctttgtcagttccattcttgcttttagactcctttttctattgtttggctttacttctctagatgatgtcagatgatgggttcctgttatgttctagtaattgggttttgcaatggatgtgtggtgttggacacgagctgtaaccagcctttgataaattctctttgaatacaaatgggttttatttgagattcaattttgttgtatgattcattcgatactttcatttacagcttttgtatagtttgctttttaagtaaatggttgtgttatcattgtggactatccttgataagtagtgtttattgactaattagtgtcaaggatagtctgataaaacatgttagcaatgtgtttttggtctgcagttga

SEQ ID NO: 116411 - DNA, 539 bp, Physcomitrella patens
  Intron number 1 from transcript Pp1s13_339V6.1 (locus Pp1s 13_339V6) derived from phytozome v7.0 (chr-ID scaffold_13; pos 2218175 to 2218713 reverse strand)
cgtacttgcagtgaacacaaggtatgtcaattgggttcgggttgatgattgatttaccattcctcgtgtgcgtgatgtaaagtcgcgctacgagcaattttattcacccctaggcttgctggccctagagtctacagcttggtgtagcaaatccaacgacaatcccgttctcccctaatgtgcgcaatgatttccctcccgatgatgcaccttgctatgagtttcttgattagcgaatttgtgaaagtgttttgtgaagtcttgttgagattctcagtcaggccgagcacgccctgttatggcatcgacgttctgaactgaaaacactcttcatgcatttcaattaggaaagatgacttggatctgaatcttctcttgtgttcctaaccaccactagtgaaagttcctcatcgtaattaaattttaacaacctgatccacagtgatgttagtttttgaacgtacagtgttttcgaataattctttttgtagatacatcactagaagtggggttgatttttgactgttttcgtaatttag

SEQ ID NO: 116412 - DNA, 596 bp, Physcomitrella patens
  Intron number 1 from transcript Pp1s96_140V6.2 (locus Pp1s 96_140V6) derived from phytozome v7.0 (chr-ID scaffold_96; pos 896545 to 897140)
tcgggaaattcttcttaagcctcgatcgtgctccggtaatcatgtttctttttctcccttcaattcgacgttatgttgcgcttggccattgagctgtgatgagctccaggtcgtttaaggccatgtggaactccctaggctttgtacttgctttctggctgtgttttctggacctggaaacttagtacttttcgtgtggttgctcaataagagtgttcccgtgattgtgagggtttcgtactgtcatgctgttacattgtgtctcgtcaattgcgaggttaaaatcgcaacaccttgaagcacgtatcttcagaaatttgaccaatttctttacagaaacaatctcacttcaaggcatcaatcacctaaacaagaatttatgcagttatcaacatggctttctgtgtagaaagttcaaataaaactaaaagagtttttctttttctttttcttttcctttttctacgggcaatgatatcataaccatagaacgtggctatcaaacctgcgaatgtattttgatcagggagagttctgtgctgtatatcactcaatttacagacctcctctcagtgacattttacgtgcaacattca

SEQ ID NO: 116413 - DNA, 597 bp, Physcomitrella patens
  Intron number 1 from transcript Pp1s1_513V6.1 (locus Pp1s1 _513V6) derived from phytozome v7.0 (chr-ID scaffold_1; po s 2966271 to 2966867 reverse strand)
ttgtggtcgtttcgagcggtaaaattgccaaagaggtgagtggacgcaatttccgttacttcattcttgcagttttttttcatacatttgaatggtaatttggctggtgttgcgatctccacaatccagtcaacaataatgttcttttttcttttttctttttttagaagagatcataacatgttcgtcatagagtatgatatgcatcgaacaattgaaagaggaaaagagattgttgcacgtatcccccatcacttgaccaaatattttggttggaaacatctctagttttgatgtagatctcgtaacacagtagcctgtgtcacgtccggagcttcgtcatctacccctcatcgtcttgtttcatggaaacagctcaacgacatggttatatccttgagctgttgcagaaaatatggaaagcatagagctcattttaatcgtttggaatctgtcttttttctaatccatgtttgccactcattgctagcagccggtggatcagttgatttacgcccggcactgattacatagatgtaggttttcaaagcgttctaaatgatatgccttggaaattgtcttaggtgctggttgcgc

SEQ ID NO: 116414 - DNA, 313 bp, Physcomitrella patens
  Intron number 2 from transcript Pp1s55_265V6.1 (locus Pp1s 55_265V6) derived from phytozome v7.0 (chr-ID scaffold_55; pos 1643721 to 1644033)
gctgaaaaatacgatataaggtgcgttttgatgtttcgtttcttcatgcagttgcgggatctcactttcatgagctactcttcacgtttttgtttcgaattcgtctcgttagtctttgtatttcctcggaagagctttttctcttgttccattgctaagatgtttttattttttcatttattattatcacaatcaagtgattgctgcaagagtatgttggagtaatcattgggcgcacatagtcactccgttgtgtatttgattccatgtgtgtccagtttctacccgacgctgaagtttttcgccaacggat

SEQ ID NO: 116415 - DNA, 1033 bp, Physcomitrella patens
  Intron number 1 from transcript Pp1s63_96V6.2 (locus Pp1s6 3_96V6) derived from phytozome v7.0 (chr-ID scaffold_63; p os 879880 to 880912 reverse strand)
tcgactcgacggcaggtcagggagttttgcacgtatgttacttacgccgcaggcttgattattgtctcccaatcaaggattgatttcattcaattgttccattgcgatgtttgtaagctgcaacatgtgatgatcaagtggcactaggtgatacgctagcctgggggtctattctggaggtgagtgatcaaatttatagataaatttaggcatcttattgagcttatttcgaggtttcgtggtcaggttgtttgactatgtaccccatgacatttttttttttcttggtattaagaaagaaaccattccacagactcacacattggtatcgttcttcaaggagggtgtaaagtagagttgtaagttgctgaagagcatagattctttaagcatactagttctcttcgaatgcggtatggggtatttcatgggtttgaatgttttaacgcacaaatatttcatactattgtcgacagattcacagttaaagacagacatagttcttgaacactcagcactgaaccaagttcaagatagatataggacaaagctcaatcaagaaatttcatttgaatcgaatcccaggattttaatagccaggatgttaagaccagtccatttgaagccacatgcgaggagagtgatgtgagtggtttggcatctccaaggtcttgagagaaggttgatgtacaactcttcatagctcgatcaatagatgatagacaggcttttcgaatcttttgcaagtaaccttgatttatttataaagacctgtgatcgcttgtgtaccaccatgtaatcagggattaatgttacagtgagcgactgtgtcgaagagtttgctgcctgttatctgctgttctttttgagatgcactggaagtgaaaacgtagccgtattttgaagaccctcattgaccttatatgcacattagcacacaacaggcatatcatgttacaactcaaatagtaagaagcatagggtttcatgatgttcaggtcaaggaaggactgcatctggctttttctctggg

SEQ ID NO: 116416 - DNA, 1035 bp, Physcomitrella patens
  Intron number 1 from transcript Pp1s14_350V6.2 (locus Pp1s 14_350V6) derived from phytozome v7.0 (chr-ID scaffold_14; pos 2109692 to 2110726 reverse strand)
ccttcctcgagcttttcgtagtcgcagtctgtgaggtacgctctgtgttttgtggcgtgttccttttactccttttcgtgagcacttgctcgggaatgtcggtgcctgagctctgactcaccatggcgtttctaagtgagtcttatttcttgagaggcttagaatctgtcactctttgcaagtgacgtgagctgattttttggcaaattgcttgtatatcttctttgcatttcgggattgtttcggtgcggaacttatctctggggtttaagagccttgggatagcgtagaattgcccctggcactacagggcactggaagagctgcttttttcctgatttgtcccatttatgaataggaagtgagttttctgagataggatgtccctgtagtggcttacttctattagaaatctcgtttcttgagtggcgaggttttggaagcagaattccttgtttttgttgttgttgtcgttgtttttgttgttgttgtcgtcgtctttgtttgctttactaggtagaaatgtttgaatggtgctcctcaggttttggaaaatttgaaatgtaatttaccttctctgaaacggaattctgtttggagccctgaagtataatagttgcacgaattttcaaaagcaaatgaaggggtaatatgtgaaccgtgattcagataggtacgggaatgatcttaggggcgtttgttaactagagggtgtaaaagagacgataaatttacatctctatacctcattttttgagaccctcaaggctcacacgatcttttatttcccagtgctgaacctgcaactcttgcacttcctttttatgttgttaatgtttatggaagtaagcttatgcttacagcataaatgcatccattatgtcgtcagttctgggagctagaatcgggttctttttctaacactgtgattaatggctgtataaatattctgttgttgatgtgtgtgtatgtgtgtttgtgcgcgctgggttgattgcagaaatttaaggcggattaagagcggaagctgagacc

SEQ ID NO: 116417 - DNA, 532 bp, Physcomitrella patens
  Intron number 2 from transcript Pp1s8_13V6.1 (locus Pp1s8_ 13V6) derived from phytozome v7.0 (chr-ID scaffold_8; pos 64757 to 65288 reverse strand)
cattacgtctgaagtaagctggtgcttgtatcttgctcgtagttaaactactcagaagtgttcttttgttctgtttgaaacgaggtagctgattagggggttattattgtcaaacgaattgatgcttgaagtgagtgttactagatgattactgagaataggaacgattgtaatataagtggttcaaaaactcagcatcagcaagtatttccactgaacgatatgaacatagaattttttcggaacattctttaaaaatcatacctcgaggaactctacaggttttttcaagtaagaagagtttcttacacatccaatagtatcgaagttcctagctttttgaattttgttcttcattacgcaaccaaattcaaaatgattgactaatttaccttctttggagctttgaatgtcatctgtgtgtttgatgttttatgtcagtctacagtctcaaatatgcatgcaagttataagcgcctatttgttgtgttgattgtgggaacagaaattaggaggcgcaacatcgacaatt

SEQ ID NO: 116418 - DNA, 745 bp, Physcomitrella patens
  Intron number 1 from transcript Pp1s54_196V6.2 (locus Pp1s 54_196V6) derived from phytozome v7.0 (chr-ID scaffold_54; pos 1195303 to 1196047 reverse strand)
gaacattgccttgcaccaccgattccgctgtggtggtactaatcctgctcttcttttcactaattttcggctctttatatatctgcttttggatcccttgctttgtgcattttttgccacatttttcgtagggtaatttaacatttgttgagtttttggatcgctgttacgaacttttgtgatgttgtggaatacgtcgacggtctgaagtttttcggcctggtttgtatcttctttggcggaactgtagttttaaggttgggcttgatggttttgataccaattttgagttggtttttgttggcgttgtaattggagacgtgggagcagtggtgaataggtcgtttcttgtagtatttttatggtaatgcgttcgttcgggagcgtgctgtgaattcttgaatgcgctcttggtgaattctcgagcactctcactgttggtttttcagcgtttcagttattggttgtagaatcgggtcttttttcactgggatatgggagcgaatgtgcagagtttcttccgattattctttttttgactcctagtattcttgacctgtacagccttgatcaaagtgaatatgaattcggcattgctgggtcaaatgcagctattttgacgtgctaaattccaaactgctataggttaggattggatctaattcgatggtatgttgcttgttattccgcctagggttttctcttgatcggggagtttttacttgagaacaggaaacttgcgaag

SEQ ID NO: 116419 - DNA, 887 bp, Physcomitrella patens
  Intron number 1 from transcript Pp1s196_77V6.1 (locus Pp1s 196_77V6) derived from phytozome v7.0 (chr-ID scaffold_196 ; pos 553031 to 553917 reverse strand)
acctcgtgctccaatcactggttccgtggacagaggtaattgccaaagttgtgagtcagtgtagaatgttgcgagcgcgggtttttcattttcgttttatgttttttcgttgatttggtttcttaatagaagtgagggaggttcggattccgagagatttaattctgcagatagaagtggtgatggtagtacttctgacgagtcgattgtttcaggccaccggattttatttttatttttttctgtttcggcactgagtatagactgattgttgacgaaagtcataacatttcaatgctggagttgctggtagacttcagtttggtgtcttatatattttgggaatagacttctagtttccgatcattttcctgcaagaggatcaggctccgagaatttgaaaacctcattggattatttgttgtttccatgatcttaattttttgttgtaattattatgatcatcgttggcaatgggatttacattactgttgaagagttcagtggacgaatccgaatgtaattattatagagagtcaaatttagcaacgatctattctgcggcaaaatgatttaattttttttttgttgatgatggaacattgcagcggagatgtgcttgtcacggcagatgtactctctttggtatctcgttgattaaaattattagtgctgtttgagggttctaagaatcgcaaatcaaatcaggattcattctgtgaggacctcgtttaccacgacgggaataatgccaaacattaacaacgacgtattcatgtgtatcagtcaggttatttggtaatccattcgcacatatgtagcactgatctatgtgaaattgatttgatgcagacactctgaagacattcttgaaggattacttcggt

SEQ ID NO: 116420 - DNA, 414 bp, Physcomitrella patens
  Intron number 1 from transcript Pp1s19_232V6.2 (locus Pp1s 19_232V6) derived from phytozome v7.0 (chr-ID scaffold_19; pos 1610631 to 1611044 reverse strand)
acgcctcacatttgattgccgtgaatcctccgcgggtatcgctgtttctcttttgattttattttggtgactttatttttgtttttcttccttctccgggtactcgggtgtttatgatagagagaaataacactgagttccgatgatctatggggtacaattatctggaattattgcgaaatttgtaggatagagtgtccttgtgggagtggttcttctttcgcatgcccgtgtgtagcctgtcaggaaaatctgttggttgcggacatgattgattaccagtggtcttgattgtgtataatgtctatgtagcaaattcttgatggatattttcgtctcaattacctttctctgatctcgcgtagagttgacattttggacagttgaattacggcgtgtgcgtctccgatctcg

SEQ ID NO: 116421 - DNA, 969 bp, Physcomitrella patens
  Intron number 1 from transcript Pp1s511_5V6.1 (locus Pp1s5 11_5V6) derived from phytozome v7.0 (chr-ID scaffold_511; pos 41936 to 42904 reverse strand)
ttcttgtcagaatcaggtgtaattgatcgtcttcctggtcattcaactattgtgatttttttcttttttttttcttctgtttttttttttttttttttttttttttttgtcaaaacctgtgtgaataagatgcaggagaaacatgactgaaaataatgactgtgtgatcgccgtgggtaatgcgttgtcaagtgagttatcagaatccgatcgaacgtgggccttttgtatctgtatctgcttagtcggaaatatcaacacccggattcattagtcaatctgtgttcaaatttagtacacggtttaaaaccatgacatgagttgttgatgatcccaggtgtgaagttagagtcagctgttcgagtataacatgaaactatagagagcgtcgagtagcttccaagagtgccgaaactggtcagctcgagtccagccatctgcagttgggggatcagacctggaacctcaacgacagggacgctacgttgttgatgcagtactctaattgtcaacagcagttggctgattgatctcctgaaccacctcgtccttctgtgctctagactgcaagaagttaggccagaaaagggttagatggaaataataagtacggtcaactcataagcaatggattctgtcacgcaaaccctcttcagttcgtacagaaccctaattgtcaacatttaggtgctgtgtagggatttgatagcgatactggtccagaagtgctgtacattgaattacgtagcgtgcaagatatcgataccggtagtatcttgtgcgcagcagacccatgctttactgggtcatatgtaattatcgcctttgacgtttcattcttcggaaggtggagattgtagagggtgcgtggtgggtctttgttttcggttttgatgcatgattttgccgtatgacgcatctgtcatgccctcagctgcagaagtagtccaaattgagcggttgctggac

SEQ ID NO: 116422 - DNA, 739 bp, Physcomitrella patens
  Intron number 1 from transcript Pp1s234_78V6.1 (locus Pp1s 234_78V6) derived from phytozome v7.0 (chr-ID scaffold_234 ; pos 510135 to 510873)
tgctgcaatctaccaaaaagccctctcagcggcaggtaactcaaatgccttatcttttgctctcgaacttgcaacagtccaaactagataagtgcagcccacggctaagccaaggcttagcattgcataactctctatgtaagagctaacgtaatattctagacctggtagaacacttttgaaggatatttcaacctctacccttctactgtaattaggagtttgacactttatgaggagttcacctatgcacacccccagcttcatcagcctgtgcacgaaacatctcctacaaagctcagaaaccatgattacacgtcgcagctcctgtgcaaaattactatggctcacagcaaccgactacacttccacaatagccaatccaccacccatatggttcgaatctgttctagaatgtattcacattcttctctgcgccaaatctgacccccaagggaggaaaatgcctgtagcatcattcgcatgaatctatatagtcgtatgccttcttctgttaagttacacgtctttaatgccagaacaatattcgtgcaattctgcggttatctagcatagataacaatcaaatgcagcttatattttaaccgttacagagttgcactacaatgaggagaatgacgttgatctattcaagctgcacacttaaaaaaccctataattaagttggggttagcataattcgcttgttcagtgcagaaaggaaccttggaagccatag

SEQ ID NO: 116423 - DNA, 1010 bp, Physcomitrella patens
  Intron number 1 from transcript Pp1s296_44V6.1 (locus Pp1s 296_44V6) derived from phytozome v7.0 (chr-ID scaffold_296 ; pos 265696 to 266705 reverse strand)
cgaggtgaggcgctttttccttgtattcgtattcatttgtgttgatactccaattttagcgtcgagcgccgtaattgcggtgcgtttggagcattctttcagcaaacatggagttgttttgtgtttttttgcggtagtgcgcggtgagcacgtttgctaatttttggatttggcaagtttcatgtttcattgctcgttgttcacggtgtttcgaccttgtcgtgcgttgctatgaacttggatgatagttgagaatggagacttgaatgagtttttgaagctgctgagatggtcacgctggtttccgagcgttctgtgtgtgagattgtatcttgtgcagggattggattctgttgattcattcctttgttgagaatgtttgtgatcggattccactgaactgacgcattgttatgatcaatcccgtgcttcttagttgtgttttatagcagacatttgtggttctgcatcctgctaagtcaacctaggtcaggtggctttcagtcttacggtattggtgctactgtagtggacataatccggctctgtttttatgatttcgtcaatcatctgtttattgtgataatgtttactggttttttgacttaaactcattgcaggatatcttctcgaagaatatgatttttgtgaatacttctagcgaatgacatttttcataggtctattttgattatgttcatgtatgagatgcttctggcctcttgaggtagcgattgtacatctcttttgacctaaatagttgtgtacgaagtgtcaccgctggcgagatgccgatgccatataatcattacgtatcaagttgaaggttttttttttttttttttttttttttttttttctttctttctttctttctttccttcttttcaatggatttgttgtacgactgtttatcaaatttgcgatacccgtctcttgtaatgcatcggctgaattgataattttattggttcgattttcagatcatatttcaccgatatccggaaaag

SEQ ID NO: 116424 - DNA, 1013 bp, Physcomitrella patens; identical to SEQ ID NO: 115339
  Intron number 1 from transcript Pp1s8_66V6.3 (locus Pp1s8_ 66V6) derived from phytozome v7.0 (chr-ID scaffold_8; pos 528020 to 529032)

SEQ ID NO: 116425 - DNA, 1045 bp, Physcomitrella patens
  Intron number 1 from transcript Pp1s13_225V6.2 (locus Pp1s 13_225V6) derived from phytozome v7.0 (chr-ID scaffold_13; pos 1473251 to 1474295 reverse strand)
atcgtgtagcacgcggtgctgggcgtgctttgattgtaagcatcccttcctagcttgcatgttttggtcttctaaatgttgggatttagttgggctttatggtttctgaatgttgttcattgggtggaagttttgtagttgcgtgtgaagatcgctcgataagtcaaaaggtctcctattgccatttcgcctctctgtttagatacggagggtccgttcttggttttcttgttctgggttttggagatttggtgagtttctatattgtggttgtctgtgggttgttggttccgggcgtgcccaggggacattagatctgtactttgcgtcttattttaggttggtttttgagtttctgatgtgaaacttagatgcatcggcccagatatctcttgttcaggtttttggtttgtgcgttatgtgtagtaagtgatggtgttttttccttctgttgttgcttagacactttttgagaatatatatgtatgatcgcttcttgggggaggactttctagaatgtccctcgattccagtctcttttgtaggtgtctactgggtttgtttggatttgagtattcaggaacaatggtactggattgtgtattaggggaacaatgctcctttgcctttttggtccccatgtgagtcatcagttgtgactactagtactggctacttgttaacatttatgaactttgccaacatcttctagatattttcgccctctccggtcctctcttgagtaaccttgtacgttgaatgccttcgtccttgtcagatgtgatctgaaattagcttttgtcattgcaagatttatcggtcttttacagcatttctttatcgcacccgacatacatctagaagttatgattgactcctatctggctacctctcctctctgttcgaccaaagcatataggaacacctccaagctagtgatatcttcaatcggaagatagtagcctatcttgtttcttggagaactcaatgcaacgattttaataaaatgcttccaaacagtctgcaggtttgaatcgctcttaag

SEQ ID NO: 116426 - DNA, 662 bp, Physcomitrella patens
  Intron number 1 from transcript Pp1s214_33V6.1 (locus Pp1s 214_33V6) derived from phytozome v7.0 (chr-ID scaffold_214 ; pos 226769 to 227430 reverse strand)
acgattgttgatttctcctcggtaacaggtttctggtacgaatcttcctgttttcgacactcaaatgtttttcgtctctctttgtttagtgtctaaaggtgttaatttctaatgcatttttcgggggaccagaatttttcatatgttccatctgttttgtttttttttcaaaaattctggtacggaatgctggaacgattaaatgaataaatgtagtgtaatgacacgaaggaatgatttttgtctggacgctgatgacggtggctgaaagaagtcatgtggattttaaatgtagttgcaattgatggataaagctttttttcttattgttgatgaacaaaattgatgctgttgctgctttacagtaaagttgctgaaatgcgcctgaatgctttaagagtctttgtagctatgatttgaagtgtaagattccttgatactagaagtgtaaagaacagctgtcatgtgttgcagagcgtgttagccacgtatcgcgttgcgggacctcacggttttattgttccgtaactcatatgtttagtgtcatgttgctcaaccagtattagtttgctactgttgattcctgctgtattccttactttttcgaccaggtttcatgttaacccgatttgctcgtgtgatgcagttttcttgtggcagct

SEQ ID NO: 116427 - DNA, 966 bp, Physcomitrella patens
  Intron number 1 from transcript Pp1s13_94V6.1 (locus Pp1s1 3_94V6) derived from phytozome v7.0 (chr-ID scaffold_13; p os 763942 to 764907 reverse strand)
cgttcagatctcaagctcaaacttgaagtgtgcaggtgctgtttgtgaactgtgtgggtggctgcacagacccaagctgcaggaaaattttaagtccttttttatcttattttgtaaatattagtgttattattgttattattattattattcttagcagttttctccctctaattcttcttcttcttcttcttcttcttttctgggattttaaaaaggaaggcagacaaaaagagagagttgcttgagtaggggacttgagttgcaacggttgtttttgaatctaagggtcaagcagtaattcacatcacacgttgaattgtcttgtggaaggcagagggggaaggacagcttccagctggatattgcttgcaaccagtgatctcttaagaagagttacttgagaggtgggtactacgagagtccgtgtgtctgtattgggttttgtagcaggatagtccagagggtaggtgctgatctctgccgctgcaagtggccagtcgttgtcagcttgtagcttataaggcgaagagcctcggcagttcggtgggaaaaatctacggcgattgagtgtcgctttttaggaataccgtctggaataggtgcttgcgtttcctctgcatcagaagtatgtgtaatttacttcgttgtgtcgatacattgaccgagtaatgcgtatcattaggctggtgaagcaattggactgaaataacagagttttgaggtttatgaagaggttgtatcagcgtcctcgtatattttgtgtctaggttttgctgcacgtcttcattgctgtaggtttccaccgctaccttaattcttggattaattctttatctctacaagttctctcgaaactgcagcatttgcagttgtgtcattgcttgttccatcgtagtcttcgatttcttaatcttttgaacttttttcggcctctgccctctgaaaatagtctatctgtcaacc

SEQ ID NO: 116428 - DNA, 479 bp, Physcomitrella patens
  Intron number 1 from transcript Pp1s120_173V6.1 (locus Pp1 s120_173V6) derived from phytozome v7.0 (chr-ID scaffold_1 20; pos 1205921 to 1206399)
tactcgctgctcgcgactactctgacaaggtattttcctctcgtcagcactggattcctgtggtctcttcagtgttctaagcacttcgttcatcaagtgaaactgtattagctatcgtaccaatggctccacgtaatacatgcttatttatcaattgtgtgccatctcaatgtgtggcacacgaaatccagcacgactaaggaattcagtgtgtttctgacacagaaacgttgaattaacgtaattttccccctcttatcagggtgattactcattactctcatcttcaatttgtctgcgggcacagtttctctgcttattttctcgtcttctctcttcccaccctttgtcttgaccacaaaacaatcaattgcatttctacctctaaatgcgggagatttgattagtattgtgtactgagctcgtgcttttttatgtgtccagatctttgttagacgatcgaactgggaggactttcg

SEQ ID NO: 116429 - DNA, 656 bp, Physcomitrella patens; identical to SEQ ID NO: 115232
  Intron number 2 from transcript Pp1s149_177V6.4 (locus Pp1 s149_177V6) derived from phytozome v7.0 (chr-ID scaffold_1 49; pos 591943 to 592598)

SEQ ID NO: 116430 - DNA, 672 bp, Physcomitrella patens
  Intron number 1 from transcript Pp1s170_84V6.1 (locus Pp1s 170_84V6) derived from phytozome v7.0 (chr-ID scaffold_170 ; pos 705042 to 705713 reverse strand)
gtgttggaggtttcgctccagcgacgcatcttctggtgggtgccttgctcttgctcttcagggtctattctcttcatgaatttcgcaatcgcagtgaagaatggttaacgtcagtcgtgacctcaacatgaaattttcagttagcgctttgttctgggaatctttctgagccagctctgtgagagctgactggtcgtttatgcttcatttctaatcttgaactaggacctctttaccgggtgatcagtaatttcaaagatcatcgaatcagaatcaacatgtatagctttatgaaatataaattttagtagtcgttggatgttagaccatgattaggtttttgcactgcaatccacagtacaatttttcgttttgattgaatcttctactatttttcattcttaccaattctatggtggattgtttattatatcaacttcaattcttcagagaaaaccatgactcaatcagatcaaaaccacataacttaccaaataataagaagttaaatttttaacatgttctcgaaagtaggtggccatgctttaatgtagcatattgtcgtcaaatatcaagagaaactaatcgaaattttgctctgtagcaaaagatttttagttgaaaggtgatgatcggcgaaattgcttgaaaggcaggaataagtacaatcaa

SEQ ID NO: 116431 - DNA, 707 bp, Physcomitrella patens
  Intron number 1 from transcript Pp1s91_154V6.1 (locus Pp1s 91_154V6) derived from phytozome v7.0 (chr-ID scaffold_91; pos 940015 to 940721 reverse strand)
ttcactcctcaggtcgggatcctcccctgtgtggatggtcttttgaagtttggattagtaggttgccttgagattgggttgatcttatatatatttttaaagctattttttttgttactttcattttaaaaaataaaaattttaagtgatggcatttgcgacatcagaatctgcgagaaaattgagcgtagttgagtgggtagcgtattttggccgtggcgcattacggggatgagattggttgcgggagaagaatgtgggttgctacttgcttttgtgactgaagacggagcattttggttcagtttattgctcgaggcgctttattgtggtctgttgtattttcgaagcagtggaaacatacctagaagaagttctcgaaagagtcatgtcatgttttctagggcttgtacggagcgattgtgtctatgtcattggttgaatgatcacggtgccgaagtttgagagatgggtttgggatgcaggtatcctatgggtctctgttcccggcagcgcattggcttgaattgatgtctatccgaacgattgcagtagtttaaagtcattcaactggtcgagttactctttaaagttaggtcaacgatggtacttaacttataacgttatcggaggtggtaaatcgtttgatctcattttcctgcttctcatctgaatagagagatgtggtttgtatgttgcaggtgcct

SEQ ID NO: 116432 - DNA, 566 bp, Physcomitrella patens
  Intron number 2 from transcript Pp1s98_140V6.1 (locus Pp1s 98_140V6) derived from phytozome v7.0 (chr-ID scaffold_98; pos 793684 to 794249 reverse strand)
agcttcctaagcttcaaaaattagccgccaagaaggtccatgttattccatcatcattgatatctaaaaaatataaatgtacgtggtggactcgatgaaggaagaaaactggtcgcttctaattttttctgcatgttacgctgaatatgaacggatatatatatatatatatatatatatatccgttcatgttcatatatatatatatatatatatttgaacatttttttcttggtttttcattttaaaaagaatcaaactaacaaaaccatgctttcattacagttccaactacagaaacaattttcctatgtttttatggccaaagtaattttataaaatgagaataaaagaagtgtgtttgttttaatgacgtcctattcaattgactgaatccaagtggacacatcgagtttttcttcagcttcatgtttaactttgctgaaattcacgagctttagtacatccacggtttcttagcatgacatgtgtatattctgatcaattcttgttcccgaaatcggaaggcagataagggacattacgaaagaacaacaagcagcacg

SEQ ID NO: 116433 - DNA, 770 bp, Physcomitrella patens
  Intron number 1 from transcript Pp1s232_41V6.1 (locus Pp1s 232_41V6) derived from phytozome v7.0 (chr-ID scaffold_232 ; pos 461624 to 462393 reverse strand)
gtggccgtggttttttttggacacaacagtttcaggtaattcggatgtattttggatttgggtgcggtgaattatacaatattgttggtatttttctccctctgttttccccctgttgtgctgctggatggagattgtaattcgaggcagtgtaagcgcgtagtgaaggattttcgattgagtcggagcattacggttgaagttttttttttttttttttttttttttttttcttcttttcctcgattgggatttagtgtgtgagaaaattcaatggaaagtctacctcgaaagactcagtgaagtttgaatttcgttgagtccggatggttttggtctttggaagttcctagttgatgtagctacaagtgaaagtgtgtgttccgtggtttaacttttaatcctgcttcacgttcttggtccacgaaggtagtctccgatgtgtgaggtcttcaatgagtcgggcttactcttggatgggcgacatccacgaacacctccggaatggaatacgccatgagccattgtaatttgcagcatttgtgttccgcttcatcagttccagaattcacctgatgtaaatctgtgatgaaatttcgagtggctgtggcggctgctaatgcatttcattacatgagccgcgaacttctttttagcatctcaccgattgtacagaatcgcccatggtatgtcaccggcgtgctgtttctcagctgaataaatttgtaggtggtgcatgtgcaggtgattgtttctaacaaaggatcatc

SEQ ID NO: 116434 - DNA, 553 bp, Physcomitrella patens
  Intron number 2 from transcript Pp1s34_35V6.1 (locus Pp1s3 4_35V6) derived from phytozome v7.0 (chr-ID scaffold_34; p os 232087 to 232639)
ggaagaagctgttggtctcctgttcctttttttctcggtcccttttttttgaaaccattgttcgcttttccttttcatcgtgttttcttccaagctcatgaacaggtgggagcgtcggtttctgttgaaagcgaaggccccagtttcaattcaagtggagtggtggtttaaaatcatctgcgtggatattgaagttgcattgaaaatatcaaatcaatgaaatgcttccgcaacacgttcgacttcatggtcaaggaggttcacttatgaacgagattatccgttgaggagttaaatgtgaggaaggacctgcaaggcgaagtgggcggtaacaattaatgctaggatgctcctctctcaagagttatgacgctcacctatgagttaaccagttgcaaagtttctgacaatcatcataagattggggtgaccgaaaggaccctgaccttttcccaatttgtaggttttgactttccctatgtcgaagttaatcgacttgtttatgccgttgctgacaggttaattataaactgagctgtgaagcgttcgtgga

SEQ ID NO: 116435 - DNA, 675 bp, Physcomitrella patens
  Intron number 1 from transcript Pp1s45_229V6.1 (locus Pp1s 45_229V6) derived from phytozome v7.0 (chr-ID scaffold_45; pos 1788135 to 1788809 reverse strand)
cgtggcgagcgtttgacgttttagagattttttttgtaagtttgctttgacttgatgtttgtccaatgtggaaatcgtgagggcgttgggagcctggatgagtatagatactggagtgcgttgcagacgtagagttcgccatcgtcaagagacttttaaggttagagcggtggggatgaagaggtgcaattgtcgatctctgtggatttgtatctgttggattctactttgttttgtggtacgtaaaaccctggtagcggtgaagagagtgcagtaaactgaatctctgagggttattcttagtacagtttgagttggtgtacgcttgtagtgaaagaggacattttggtgaagtaatttgtcccaacaaggggtaacttgcacacgtgaaacttaagcacttcgatggggacctctcgttgtgttatgcttcttatctttttccaaaatcgtttttgactttgaatcttgcaattgtgtgtcacctgttttgaaaattattctgaaaaacattgaattatgttggcagaaagccctgagttagtttgtcgtttatatggaacttggttttgcgtcttgttagctttgcagatgtacgtgctggtttccgttctacactaatatctgcgggtctgtgcagatcatccctctcacagcattacagattgttgtgaa

SEQ ID NO: 116436 - DNA, 446 bp, Physcomitrella patens
  Intron number 2 from transcript Pp1s1_264V6.1 (locus Pp1s1 _264V6) derived from phytozome v7.0 (chr-ID scaffold_1; po s 1800993 to 1801438 reverse strand)
ggcagcggcagcggcccagagccagcagcatcctggtgggtttacgcccttcactgtggtgaccatgacagttgtggctgtgttctctgtttggttgtctcaaattccaaatgcaccgtggtcaagtatgtcctcttttccttcccgtgtctagggaattctaccgtacatccatctacggttcttgcgcatcgctagttacttgcccttgcattacattgctctgcttaatggtctggtttggacttctcaataaatagttgcaactgttggcttgcataaaatattttggacggaaaaattcctggagtccattaattgctcatggggagttttgaaaccgatgttagattcatgaatcaatactcttcgttcgtgtgattcgttgaactgaaaaatactgatagtggtttgattgactgttggacccaaaggacatcacgaca

SEQ ID NO: 116437 - DNA, 847 bp, Physcomitrella patens
  Intron number 2 from transcript Pp1s34_445V6.1 (locus Pp1s 34_445V6) derived from phytozome v7.0 (chr-ID scaffold_34; pos 2331935 to 2332781 reverse strand)
acaaggctcgccgtctaggttacaaggccaagcaggtacgtgttgagacttcaatttggctattttcttgcaccctttgcatttggaaaaattgtagcatttgaattgttttgatggcgtggcgtgaagtggcgtagaaaagcatctactatatagttctgtccagtaggttgcttgcaagccccgataacccattttttttgggttgcctctctcactcacataccatcgtgccgaataattgttgaacttctgaatggtcttaaacgtaaatgaaactgcatctgcattctgtggttaccacccgtttttctattctagtcctgcttaattcatcaggagttgcgtcgcgatgttagaaatctcaatgttactagccaaaactgagtatgtctttcctagttgttttatgtctaagatggcgtcgatgatgtggtgtgctagctacatggtttcagtggatttcctttagatggcagttgaggagacacattcgtgcatgttttgacaataacctttataaaatttatcgtcctcctgatgtcatggattgggacttgctcttctcttgtattttatttgtgtacttgctcatcggaattattcatgctattttgtgaacttctggagaactctgatcttcttacctcgcgagcctgtggttttgattttatctgtttttgcatctgagtctcattcgatacctattcttgaacttaatgtagaaatactcaatttgcatgtcaacatcagctcgccaaggttaaatatttacttaacatggtatttgttgattccatgcgattctaattctgacatatcatcgttgtggtcttgttttagggtt

SEQ ID NO: 116438 - DNA, 900 bp, Physcomitrella patens
  Intron number 1 from transcript Pp1s96_37V6.1 (locus Pp1s9 6_37V6) derived from phytozome v7.0 (chr-ID scaffold_96; p os 253030 to 253929 reverse strand)
ttcaacttagcacgaaggaggattcattgctgagggtttggagcctgtcccacctgaacctgtgctttcctggcatgtatgtgtgcgaatttaatgtggtgatgcgttctcagtcgtttttgtttacattgtttcgggatggaggcattcgggtggaaggaatggtgtgggtagagaaatggtgtgaggaaacagttcgtgagaagaattagatattgagatgcggtctgatttgcaggcgtcgtaatggtgttctgtttcgtgctagactgaatttatgagtatggagttagggtttaagtgcaaagactttgtggtggtcaagggtaattgatatcttttgcggagagcttgtgaatctttggtgggtaacgaagtctttgatggtggtaactactgcgaatgcttagattctttcgcagcacgaattgctatggccgcactttctctcatgaattgtgaaaaaatttcagtcagcggttgtgaggggttacattgaagaacaagcggtgcgcttatcgattttgctcattttggattgactgtgtacataagcaattttgaggacgcgagtgtttcctcgaggttgttgtcgtttgctcaacaggcgtcaatagcccattatagcacatactgaaacttagccctagaattttgtcattcgagtgaaggtatacagttatgtgagtttcgttgtctacatcgcgttgtagggttggatgtattcgcgtgattccaggcttggggttggtaaagttgtttgaaataagggatctctgcatgcgttacacgtctgtttcttttgctgtttgtctcccatcgtctcaaacaaattcgattttctacgatgttgaacagcttctgggctccctgtgcatatctgaactcgttaagaacaag

SEQ ID NO: 116439 - DNA, 778 bp, Physcomitrella patens
  Intron number 1 from transcript Pp1s34_313V6.1 (locus Pp1s 34_313V6) derived from phytozome v7.0 (chr-ID scaffold_34; pos 1606024 to 1606801 reverse strand)
acggagtcaaggtgtttgtctttacttcttaccttctgtgttcagtcctcgtgctggattagtctatgatcgaccgggaccgattgtggggaattggtgatcgggtgtttggtttcgcagggttggttttgtcgtttcgttgctgttttattgtagttaggtttgttgtttgtgcattgcgatctgttgcttggaggatcacggacttgggaaggatgcggggctgggcttgggagaaaacaaggtgcgaggatttgagctggcaattttttgaggtgcagctaaggtggagtggagctctgggtgctttgattgctggattacgttgtggttagtgagctgggagatactagctagctggacgaatgtatcatgtttaaattgagatcgggctaggaatctggttcatgtgatcaggacatgaataaagtaaaaacagaagaggaggaaaaaaatggaggaaaagaaaaactgtttcatgtatattgagattgatatcgatctaatgagaccctaaatgattatttcatggattggaattcatggatagatgtggctggatccgttcggctcgttcaggaattcggtcttatttgcacgagtgaaatgtttatgaatttgtgcagtcctttgcggcttcatgctgcacaatgttttttgataaacagctgtgtctacgaggtattagagaatcttgagctgatgaaattgaatagctgcgtggatttttaattgaatggcaggaaaaaggagaggacccgttggacgaagatcactg

SEQ ID NO: 116440 - DNA, 966 bp, Physcomitrella patens
  Intron number 1 from transcript Pp1s68_153V6.1 (locus Pp1s 68_153V6) derived from phytozome v7.0 (chr-ID scaffold_68; pos 812325 to 813290)
gaagtgcgtgtttagctggaacagagttttctgtggtgattactccttatccttggcaattttgaggcctgggtcttggtcggtaacgatgaatatgtaatgttaggcttgtttcggagctctttttgctaacgggtctcaccgaggcttatttctcagggtttcaatgttcagagctggaatagtgaagtggttgggttggaattggaccccttctcgcctttttcccaagtctttgagctattttctgtaatcatagtttagttgctggaggacttggcgaatgaggtcgtacatccgactacatattacagtttattgctagcagtgctagaggttcaggttgcgatccttgatttgaaggatttcctggattagggttattctgcattcgatgttccgggacgtccggaggcgctgcatacacggaattgggttgagcgtggattttatgtaggaaaacctaatttgcgttctacaagtgcatgatttttcatttagggtttatgtacaatggcttaatgaagatgaatgttgcaatcttagtatggatcacgagaaaatctcgtgttacctcccggtcttgcatgtactagtcttcaacgcttcatacctttatcatcatcaaggatgggaagacatgaattcgttgtgtttgtagaaggcacagcgttatttttatttttatttttattagtgtagtagttgttgtttcaatcctgcctgtgagagataggtattgatacgagtaatttattggctagataacgtctatttcattgcgtaacgttgtgtaaggatgtccgcatcgtctttgctatcttaggcaacaggagggtgcactggacacagtaaagtctttcaaatgtaaacagattgttgaagttaattggattacgtgtggactgatcaattgtatttgctatggcagctgtaatcctcgtgtagacgaccttgattgacatt

SEQ ID NO: 116441 - DNA, 619 bp, Physcomitrella patens
  Intron number 2 from transcript Pp1s23_154V6.1 (locus Pp1s 23_154V6) derived from phytozome v7.0 (chr-ID scaffold_23; pos 1087103 to 1087721 reverse strand)
aaggtgattgcatttcatgatttatcgctttggaagatttttggtcatgaagtgcagcggtgtatttaacatagtttggtttttgaaacaagagttacagggtgaagagctctgactggggtttccgactgtctctcgcctctattacgggctgataggcgttcttagtagcatttcacagcgactagatcgtgtgcctttttgctggtgaagtagctcttgtagttgtcttccgttatatgaaggcaatctaaatctcttttcacagccggattactttcaatattattattagattaggttttcttctcgaatttttaaagctgatatcaactcatactaactgtctaataaataccttcaaatatctctgggttgcctttttaggtgttgatgtgtttaagcttgcggtgattgtgcattgaggatctgtctgctgcacagtttgggagttcagaaagagcaacgctcacacactagcttcagttccatacatccccccaactgcagtggggtgtgctgtttatggaattagacagcccattttgtgtttttggttgacgggatggtttattcgttttgcgcaggccgtagattgttgggttgtcaaaggagacaa

SEQ ID NO: 116442 - DNA, 369 bp, Physcomitrella patens
  Intron number 1 from transcript Pp1s137_291V6.1 (locus Pp1 s137_291V6) derived from phytozome v7.0 (chr-ID scaffold_1 37; pos 1109115 to 1109483)
ggcttgaagcattgaacaacgaaactgttgacttggtgagctttatcttcactttatagacgttccgatctacttatagagaacaaaaaacaaatacgccatccttctgttctggggctttttcaattaaattgatgtcatgtggttgcatttctaatattaagcgctttgaatttaatgccttacaccaatgtgccttggatttctaaaacaactgtgcgttttatcgtacgcattctgcttcagcctttacttgctgttgtaaaattgaaatgcattgtttctctggaatttttaggatcaacgattcgcaatcttgtgctgttgtatgcaggaaaacataccggttgaggaggtctttgagcaatt

SEQ ID NO: 116443 - DNA, 379 bp, Physcomitrella patens
  Intron number 2 from transcript Pp1s137_291V6.1 (locus Pp1 s137_291V6) derived from phytozome v7.0 (chr-ID scaffold_1 37; pos 1109534 to 1109912)
aaatatttggccaaaacaagctcgaggagaaatcggtacttctttgttttccacttttgatccttcgtctagattttcctagagcaattaactttgatgcttttctacttgaaatcaagaattttttgggatcattgcatcaaggtgaaaacttttgtctttacccgccacacttataaataactacaacaataaaaatttacgatgaaaacagttagaaatgttttatttaacctacattgtgattattttttttaatgagaaatttcaataacgaaaacgtttttggatctttttttcttttcttcttgaatcatgtgttgatttgtttctgtgtgcgcattgacaggagagcaaagtcctcaagttcttggggttc

SEQ ID NO: 116444 - DNA, 841 bp, Physcomitrella patens
  Intron number 2 from transcript Pp1s118_151V6.1 (locus Pp1 s118_151V6) derived from phytozome v7.0 (chr-ID scaffold_1 18; pos 769538 to 770378 reverse strand)
gctggtttgtgttcgcgcagcagttgctgccactggtacgcctcttcccactgtcacaagttaactgtcccttgttccacgaactcttctcgtgcggcattgccggaatgcagtgtcctgaaccactgagactgtggagttcaaaccctcgaagtggtgtacacatgagcacttggtttaagaagccccgggaatgactagacttcagggacctagagtcacagtcgcaaactcagtttggcgccgcttttcaattcgtattgtgtggttaaatacatcgtaacttactgggatgtgtcctccgcgaagagaaagacctctaagcgctactctattagtctcttccgatatcgattcgtcgctacattggcaaatacctcctatccaaggcagcttgagtgtaatgtattaaactataagtgtattttgatattttgatacacacttacgtttcctcgttacgaatagtgttcgtcttcttgggaggtttgcatttgtacctctccacaacaattgttaccctacctcattatggaacccttttgcaacacgctcaatgtacgaatttgaagctatcttagaattacatcatttagaacaatctacatggatagtgccccttagagcggtaccaatattcggaattaacaatgaagactgatagtacgggggttagggcgtcaatttttttctcgatcacaatctgctgcattcatgacatgatccgggtcttgaatccttgaagagtgtatgcaactaaatcatgcagatgagtcactgatgcgtttttatttttcatggagtagaacacccattcttcggaacccgaccgatcggaaac

SEQ ID NO: 116445 - DNA, 988 bp, Physcomitrella patens
  Intron number 1 from transcript Pp1s428_17V6.1 (locus Pp1s 428_17V6) derived from phytozome v7.0 (chr-ID scaffold_428 ; pos 192850 to 193837)
aacgatcgaagctatttgcagttacgcggttccaagtcagttttttaaatttaacttgattgttcttgcattgtaagctgcttttatttttccattctttttttcttttttttttgacggtgcagtggaagctgccttggcgcacctttatttagggtttagttacctaaatagctaaataaaggtgcgcaaaggcagttcatgatatcaacgatgagcctgcctcggtatcttggaagagcatgtcaaggatctctttggagggaggctctagattgcagcttaggtcctgatgatatggtgcagtagcttcacacttcatcccaagtcgtaaggcctactctcaattcttttggtggctacaatgctgtagtcaacgctatcccggcgttgtatggttttgcaacttatcccccctatgtgattacactattagattatagaatgacaatttgttagtttttccctggcattatacctttgcacatttcttccagcagacattgttgctcggctttttcttttcatatactgacgtttataatcttatatagcttttgctaattatgtagagaatcagctcccatcaaagagacaaactagggtgtaatctctattttatttggactaggtgatggaagagcttctgaaatttcgaaacagctgttgaccttcatgttagagtgtgctgttactgaaagaatcgtgaactcaataataaacaatagcattgtgaatttgcatcctgtggttacattcagagtttgtagaattatacctctcttagttgggtcgtgatcttatgcatgaaatagcattttgatcttcaaaggccaaattccgtttcaaacggttgtcatacttaacccaccctcctgtgctcactcactcattcacacatggatgtaaaaaaaacgcatatttgcaatccatctcaaagactcatgggctctttccttcatgacagcgccttcttcttccccctccc

SEQ ID NO: 116446 - DNA, 863 bp, Physcomitrella patens
  Intron number 1 from transcript Pp1s29_103V6.1 (locus Pp1s 29_103V6) derived from phytozome v7.0 (chr-ID scaffold_29; pos 704532 to 705394 reverse strand)
gctatcgtgaaaattcgagtcaacgtgcctgccaggtttctaagctgctcttcttgcaaatttggtcggattctgtgattaaggtttggctgccgggcttatgtggtggcgaaattaggatggaatttccttgaggaattaaaacggatttttgtgtgtgcgtgtgtgtgcttgtttgcgtgtgtttttatttttatttttattttcatttttcatttttttttccggagtttatgaaatagagtagtggcaaaggaaggcggagttgttgagtgtaggtcatgccgactttgggttttgttgtgttgaattttgatcgtgatactcgtcaatggacggctggttttcatggtggccaccgtactggtttatttggattacgtcttcttcaatgttggttatggacgggaggctctccgacaatatgagagtttcgcattgcatggtcgtaagcgaacgaattgagggaccttaacaacttcagcatattcttgaatgtgctgatgaacttcactaattctgctaagcttgtagtacgcgcagctcaggtttaggttataaaatgcagttagtttagcactcgagatgctgaaacaagcacagttgctagaggagacttttctgtaacacttcgttgcgtaattctggagtgagcaggaaaaatttagagctgtggtcctagttcttgtgactggcaatatgttgaacttacaaggatccttggatggaactgcctcataacggtgggaagagtcagtgaaggaatgcttctctttcagtaacatctactatgtgtcgttttgagttttcatttgttagagcggcttctggtcctgcagtgtcaggttgattgaacaagagct

SEQ ID NO: 116447 - DNA, 792 bp, Physcomitrella patens
  Intron number 1 from transcript Pp1s196_107V6.1 (locus Pp1 s196_107V6) derived from phytozome v7.0 (chr-ID scaffold_1 96; pos 691233 to 692024)
tcgggaagacaaggttagtcatgcatcaacaggactgcttcaactcttctttgtatgcttaatgtggcgaatattcatgttgttattgttgttgttgccggcggcggcggctgtgatcgtcagtttgccttagaagaaattgaaagcaacccttgccgactaatagtgactgtggcgataaaaccctcgggaatgtttatgggtcgtttgattaatctccaaattactttgaggtgaagatcgcggatcttcgttctgtttttttgtttgattggaaacttatcgctagaccatgtcactcacggtacttggcgaaacacatttttcttttttcttttttcttttttttcttttttttgcgttttatccatgttcttgtggaggtatgcagttaatttttcggctgtgcaagaattttctgatttcgtacccaaatttgcggttatttccttgggatgtaagatcgcaatcgccgcttctgagtcttggtgattccgggtttgttttggtggaacatttgttttcttgtgaaagaggaccgatatatagtatcacgaaatatattcttctgtgttggagattttgagaccaaagttcctggtctctgtgtttgtggttgtcgatgtcggtgacaattgcttggtctgagtgttgcaccagctaatgttattagggctcacgggtacataacctctttgttttgattcttagagcagaccgcacttagggcttttctaacttagctttctttgtataggtggaaagctgaagcccttgaaagctcctaagggc

SEQ ID NO: 116448 - DNA, 758 bp, Physcomitrella patens
  Intron number 2 from transcript Pp1s354_15V6.1 (locus Pp1s 354_15V6) derived from phytozome v7.0 (chr-ID scaffold_354 ; pos 211695 to 212452)
ggcgggattcgtggcagagaaaatcctcttccaaggtaaccctcgaaatcttctggaaatgacgtcataggagtttacaaatctttgttcgtaagctatgtgcatattgcagtttaggtttggtcgatttttattttaggtttcacataaatttttgaatgcagcttctctttgtaattttgatagagcattagtttcgtggagaagaatattattcacaattcgcaaacaaaaatgacagataagcttcaagttttgggtagaactgaataaaatttagatagaacttttcacatttatactaatttgtataccccactctaccatgttatcagaatttgcattcttaccatgaatggaagtagttgaggtgagcagactttgcagagaactgacccaattaagtcaggactcaaaactacacacgtctcgtgtttgaaaataagattttcaatatgtagacttgaataaaggtgcaggtcagatggtgctatagcaaaaactgaaacaactgtgcgataggataccacagggtagggactgcatcaaagggacattagtaatgcttttgaacactgatgctttttcaatgggaatcgccctttggcttccaagttagtattagatttccttcgggcacgtatgcacatacttcaacgaatgttaagattgcaattttgtattacctatagtcgggaactctgcttttgtggctggccactgacaatatgttatgggagtgttagcaggtagtttgc

SEQ ID NO: 116449 - DNA, 885 bp, Physcomitrella patens
  Intron number 1 from transcript Pp1s238_46V6.1 (locus Pp1s 238_46V6) derived from phytozome v7.0 (chr-ID scaffold_238 ; pos 495641 to 496525)
gcatcggccttgggattttcggtgagtgatcctgagtggcctagatcccgatgttggttttcttctcgtgtttttcaattgtggttttcgattgaggaacttgttgggtttttgctgctttctgtagtctgtttttcttcttctgaggatatggatctgcggggttagggttaaggtttccatctttgaggagctttatgatttcccacttctttttttctttctctggcagtagtaatgagcaggatttttttttttttttttttttttttttttttttttttttttttttttttttctctttctttctttctgttccttcatttgcaaaaaaagtgtatccggaatttttatggtttcaatggtcgtggcaaatgccttgaggcatcctccactttcttttttttttcttttttttgtttccttgctctcgatggaggttacatttgaaaaacctataagcatgttttttttctttctttatatttatttttccttgattaaggtatgatatttggatcaaatgcttcatttgctaattttaaggctcaggtgggcagacactcgtgaataacttgtgttactcagcagtctcaatttcggatttggtgttttgctgctcttatagtgatttgatttggatgatctcttggtttctggctcatttacgggcctatacctttatttttgtaattgatgttccctgtcgaagcacttcctgatcgatggaggatgataaatattttttgcacagtgcttgttaatcgtgtagatcttgatctgtttccttgtgtgagcgtctttatcgtttgcccaggaattgatgttctgctgggtttttgtgctctataacaggtggctcattttggaagattcaccatttga

SEQ ID NO: 116450 - DNA, 804 bp, Physcomitrella patens; identical to SEQ ID NO: 114768
  Intron number 1 from transcript Pp1s118_176V6.2 (locus Pp1 s118_176V6) derived from phytozome v7.0 (chr-ID scaffold_1 18; pos 838589 to 839392)

SEQ ID NO: 116451 - DNA, 725 bp, Physcomitrella patens
  Intron number 1 from transcript Pp1s27_374V6.1 (locus Pp1s 27_374V6) derived from phytozome v7.0 (chr-ID scaffold_27; pos 2521121 to 2521845 reverse strand)
actttccctgctgcgcacaagtttgctgtaagctacttgctcaactttccggagtcacccgtaacatgtctgaaaatccgcctctcaacgctcgagtgtgctcttaataaatgcagtgagattttaggttagataaatttacagctaaattaagtgttgtcgtttattaatcggaatcctgtcagttggcatcgcaatgtgtgttctacttgttaaactgcataaagaattgacacaggatactatttgacattggtgatggacatggtttttaagctgctatatgatagtggatttttatttatttattcctcggttttatgattttttgagcgggggttttcatcgtctcatctacacacgagattaagattctgctactggttttacaatcattgctggggcaaagttttgagaaacttggacatgacgatgatgtccacgcgtctggtttatgaaggtttagggtttaaggaccatcgattgtgatcattttcaaacgtttctcctcagaagacgcgataatatcttcagaactgtcgcgagttcatatggattcatttgtgtgtcgtttcgcctgcagttcttaggtctgaacgcatggtttttcagttaataagcgttaataaaagattgttggtgtattctgtgtatgtatataatcagtattcttcacagctaagtttcctctcgaacgcaaacggggttgcaggtatttacttggc

SEQ ID NO: 116452 - DNA, 767 bp, Physcomitrella patens
  Intron number 1 from transcript Pp1s105_41V6.1 (locus Pp1s 105_41V6) derived from phytozome v7.0 (chr-ID scaffold_105 ; pos 234899 to 235665 reverse strand)
gtcgttagcctctggtggcattgagtttcgcgacggtctatgtccattgcttctttttttctgaaatttgcttattgtttgcgtcgaagcagcgtttcggtgttgagggttttatgaaagaggactgatgtgtgttgggctggctgttctgttgtcagttactgactcttcgctgttttccttttgtattggtagacttaatcggaagtcgctccagaagaattgtttgcggtagttatcaacgtgtttacgagagaccttgtttttgggttatgttctgcttgcgcatgtgtgttttagtgtagagcattacttagggctgtaataggttatagaaatgaattgtgatttgtgcaggtgtaagttagttcgcagctatgattaattttttagctaacgaaatttgaatttgaatgcacattgtatttgagatgaaatatgcgggattcgtgtgagagaaagtctgcgtccgcttcaagcgaaaacaagacgagattgagaagacgtatgtttgaggagggatgaatttaatatcgcgtttaggaatcaattagtgtggcagtcttaaaatgttcgttatgttagctttagtttatcctcattttacagtgagtatatacttggttaattcttgcaattctgagatagtgaggaccagggatgtggcaaagcttgaggtaacaaacacgtggcatgtcgaagtgctgaacgattttttctggctgaatgcagaatccggatcaactgtcggcgtacagagatcgtag

SEQ ID NO: 116453 - DNA, 507 bp, Physcomitrella patens
  Intron number 1 from transcript Pp1s515_4V6.2 (locus Pp1s5 15_4V6) derived from phytozome v7.0 (chr-ID scaffold_515; pos 52726 to 53232)
cttgctcatctctctttgtgcctcaggtatccactccataatgataactattggttgatgccgaagtctctatcttcacctctgtctacgctcctcgtgccaccccctccttgtccaaaccaagtaaacttactatgcgtgagcctctgcttggttttgaatatctctcgtttcatggtaccagagatgaaggtgacgactgttccgttctagaattcattgcccgcaaatcgtcgttaacgtgaactacttggccctggtaggtgtggcgcagaataggaagtttgtggagttgtaagctgtgacctcttcagcatttgtagcattaaattcgctgcttgtagtggaatgtgcaggttttgtttgtgcttacgcgttcttttggttttgagtgatatttattttttttctctttttcagtatccttggtgtgcgccgtaaggtgtggttttgttttaaggtggccttgcagtgcagaagacccgcgctggggactgagattttgtc

SEQ ID NO: 116454 - DNA, 888 bp, Physcomitrella patens
  Intron number 1 from transcript Pp1s52_58V6.1 (locus Pp1s5 2_58V6) derived from phytozome v7.0 (chr-ID scaffold_52; p os 783189 to 784076)
cagcaacaggctctggttccaggtgcactctccaaaccatcattctatgcgctttggaatttgtggttgcggcatagaaacaaagaattctgcgacgtgactctgctctaaaagttggataattctgcgatcgatccaaaaccctaacagtcgtgtgaactcttagcgtacgttggcggattttgttgaatcgccagattgggggttagacacgattaccgcatttttaatgtcgatcttctacatagcgggtcgaagccgtatttgataaacaaaaaatagaaaacaaaatggggcggcgtcgagcgatgtagttagagggttcaagtttgctctgtgactgttaaagctctgattgagattgtgagagtcgcttgggcagtcaccaagctcgtgaatacaaggtcgtttccaagtttgaaaggaaattggttgaacattcccctctccgatggtgcacacagctgatactcggctggattgtgtgttttgttacgtttctggcgtcattgtcgatgactttgatactttaatgaggagctcaaaatgatgttgttttgaactttaacctcgctgcgaatgtatcgagcttgtgaataatttcagatactaaccctataggtttagttgtacgtacggtggaatgactttcgatcctcttcaagtttgctgtggttttcttgctgtgcttgaggttcaaaatgtgtgaattggtctgcaatcacccggtttaacattcacccggccaaatgctagtacttaatagaacattttgtagtatagatcaggtaatcctggcacatacttgacaccagtttgtatagtcaatctcggatgatgtttatgaggatgttggattaatgttggtcacgtaatcaggggaagtga

SEQ ID NO: 116455 - DNA, 724 bp, Physcomitrella patens
  Intron number 2 from transcript Pp1s19_362V6.1 (locus Pp1s 19_362V6) derived from phytozome v7.0 (chr-ID scaffold_19; pos 2650769 to 2651492 reverse strand)
cgccgtgacaacggtcaaggatcaaggctcttgtggtgagatgccgtacttgtggagctgaattggggcttcgttacttcaacgtggtggttttggcttgtgtagctctttgtgtgttgttaattcccgtgttgcgagtaacgagagcctctagatcctcgaggtgcagttgcttgtattttaggaagaaggttccgtcgaagtttttctcatcacaactccttttcttttgtaatttgtgttgacttgcggccatggttttagttactagagatttgtcctaagtgtatcgttgttttggtacagagttcttggtgtttcgtacaaatttggtgtttgcttgaaagagttgaatgcactcgtgtaacacacacaactataccttcgaagtttagggaattgctccaattgcggtgtatatatcttctcttttgtttccaggggtttgttgtatgtttttgcttctgtcacttggaagcggtgggtgctcaatctagttagtgttctactataaatacgtattaggttggtagcagatgtctcgaaaaaaacaaattcggactttacggagtattctctgttcgagtacaggtggtttttacctccaagtctgcaattgtggttgtacccacttgttctagtagaatccttctagtccattaacgattattgtgctttataactatcaggaagttgctgggcgttttcagctattggatctgtt

SEQ ID NO: 116456 - DNA, 1000 bp, Physcomitrella patens
  Intron number 1 from transcript Pp1s381_18V6.1 (locus Pp1s 381_18V6) derived from phytozome v7.0 (chr-ID scaffold_381 ; pos 213469 to 214468 reverse strand)
cctgcatcggtgccctgttgtgtttttttttaaaggtcagtccctctatcacgtcagtgtttcgcatttccgtgaagtgctcagggttttttttgctgcgaactgtcggtggagatgtgctttttgtcgtgtttgatgtgtgtgcggtgcagcgatggtgggtttcttggaggaggagggagagtcttattttagtcttgttgcccggtgtgctcggggcgcgaatgtgggtttatggtagcgcacaggtctgcgtttgcgatatgtgtgtagaaccctgtgccgagcgatcatcataatagtagtttctcgtttcggaggggctgggcttgtcaagtggaacgcagagtcgtagttttgagagttccagacgcgcatcgcgcagctgtagtgagatgtagcttctcggtgtgtttagtcaaggtttcgcttttccgatctcggatcatgtttacgtccgtcctttaagctggatctcttgttctttacagaacttgttcatcgccctgactaagttgctccagtgttggtctgaagacgacaagcctctttctttcttgaatagtaagaagaggaatttaatctgaaggcttgttttgtacagtagttggtcgtttattctttgatgtttaacttagcgtttcgttgtacttctactaatgtactctttagcttggtccgaggctattatttaatgagtcatgccctgaagtcgggaacagcgggttgcacctacaatcatatggatatgaggattcgggtcgagtattaacttgtagtcctttgttcattgtttttgattgcggggtttagctggtgcaactgcctgaatagcacgcactgctttccctgcgttcgaatcgtcatcaacattactattgtgtaatccacatggctacagctgctgtaaggttctgcgtcaagggcgttcttcaagaaataacctatgtcttccttgaaattaaatattggtggttgttgtgcaggtccgtattaaata

SEQ ID NO: 116457 - DNA, 1010 bp, Physcomitrella patens
  Intron number 1 from transcript Pp1s75_55V6.1 (locus Pp1s7 5_55V6) derived from phytozome v7.0 (chr-ID scaffold_75; p os 274989 to 275998)
gacgccaagaaggtgagctgggttgacttgtttagttcttattgcttgctgttgtgtcgattgcccagagtgagcagtttggggttcgattgcatgttgttaagcttgctcggtgttggagtttggttgagggattgtggattgtacgatgttttgtggagcactcgtggggcatgcgtaattcagtagcaggagacgtttatgggttgctggtgggtgcgagcgggtgcttgagagcagcggtggcgagggtagttgggaatgtggctcttgtagattgtcgtctgatgagattgtcgcagttatgttgggggcgtattctatgttggaacatgctagggtttcggaaagaggcagaggtggttctctcaggtgatacttgttatttaggagcgcttcaaataacatcctctgttgcagcgagactcttgggggtggttgttacaattttgagcttgttgctgtatcatatgtccgttcaacttgtggttccatgtcgtcctggttgtggccaccccacgagtattagagtactatgttttctcgtgttttgaaccttttttggagccccttcgaaacttgtccattttacaagagcaaggtgtaagagacgtagatgacactgtttgcttttgtgaaatggacattagctgtacaaaggcatcaaatcttgttctggaaatcatcatttaaatcaatgttcttaagtgaccttcacgcagagccacttgaataacagacagcttttagtttcctcagagaagtgggaacttctgattgaagaagtctcacggacttgtacgtttacattgttgtacgtgtcatcattactctactgcgactgaactatacacttctgaatcgatcttgtcacaggggcaaaacattcctaccagaaaggttaaatctactactcgttgataatgcgtttaggtgtaagagctgaaatatgtggtttcaatttcttctgctaacgttcgaggatgactttattgcacagggaattagcc

SEQ ID NO: 116458 - DNA, 772 bp, Physcomitrella patens
  Intron number 1 from transcript Pp1s227_136V6.1 (locus Pp1 s227_136V6) derived from phytozome v7.0 (chr-ID scaffold_2 27; pos 731562 to 732333 reverse strand)
ctattcaggtttgaacctgatacttagaatcagactcatcgtttaatgcgtcattgccttacatgattgtcaacagggagggatggttatgcaagagggtgcaagaggtggcagatcatctcttgaagcatcttgcatgaccgtctcttcctgcaggtagagttatgtaaagaattaaacaaaactaacttggtgcatgattatggtataaggttaagttgtagtctggaatgaaatgatagtacaacgcttgaaatatgattacagtcttcttgaaatgctttacttcatatcttcatgtgcaaggacatggccttgttcatgtgtcattttgagttgtgtccagtcttattcgaagaaatgaggagtactgagttggcagaagaattaagtccatagtatgtggaaataatcgcggaccttcacaccaagtcgcctgaagcacgttgtttgattgtcctttgctatcaattctttccctcggacaagcctacagcgggtccgagagtcgattacagggatttggtaaaaacatagaaacacattgtaagcgtccattgtggtaaatcatgtcattgcaatgttcttccgtcttttcagagattatgatgcgtttaagagttctgctaaatgtgaatgacgtgtggtttaggttttgaattcactttctccttcaaggattgtgaaatacatgttgcaaaaagcgctcaggtttggatagagcatgctctgattgtttgggtgaatgatacatgtgcaggtagagacggcc

SEQ ID NO: 116459 - DNA, 630 bp, Physcomitrella patens
  Intron number 1 from transcript Pp1s63_91V6.2 (locus Pp1s6 3_91V6) derived from phytozome v7.0 (chr-ID scaffold_63; p os 816086 to 816715 reverse strand)
gcacccttccgtcatcggagtatcgttagactcacgtattgttgcttgctctgcttttgagtttcatgccgcgctcctcccggagcatcccattccggcagcttttattgcggcacctgagtaggttaattagtatatgtgcaatctctagttgcgcattcggttatccgttgtgtcgttgaacttggtctgacgcggtgtagatctttccttcaggagatttatttgttgtaaggcaggttgtattttgtatttcagccgttctttctgaggtgtagttgacgtgtgtgtttttccttccttattttacctctcatggcgctcgaagcttttttttattgtggtgaattaatgggatgaggacgatccgttgacgaggttctccttcgtgctgtgtttcaatgtataagtctgttttgcagcgtggtttcgttgtattgtttttatttttattttctctttgtgattcggagcaatgatgcccaggtggtttcctgctgcggttgaggtttttcttccttcccgagggctgccgacttaggttctcgaagttcatcattctcgttttcttcgactaataggcctctttggacaggttgctatacccgattacctcttgtggagttgctc

SEQ ID NO: 116460 - DNA, 762 bp, Physcomitrella patens
  Intron number 1 from transcript Pp1s229_33V6.2 (locus Pp1s 229_33V6) derived from phytozome v7.0 (chr-ID scaffold_229 ; pos 341087 to 341848)
gcaccttcgtcctcttgtgctcgctgtttggtttgtttgctcggtttccctcccttctccatgctctttaggccagaactcttctatgttaatccgaggcaaccatagctgcggtggacttggtttctgggtgtgaggtcgattgcatgcatgtttctttctcattcttgtcgtgttaattggtatttgctgcgtgtttatgagcagcgaaagaagtcattatttttggtcgttggtttagttttgtaatttttgtaatttttgtaatttttgattattttaggtagttatcgttttcgttcccatctctttgattgattacttatttctattatttattttgcaatagttggtcggtgagtgattgccatgtacctgtagtgaaggcgaatgtctggttacagggaagtggtggaccgcttcaatgatagagaactttgtcttacgcttttcataaagtactgccaagagaagcgtagagaggttgaaaatagaattcgtcggggcaatcagttctgttttcgttttttcggaatgttggcaagtgatgcactgtttgaggaatgctgtactatgtttctttacagtgaaacagatctggtgcttttgtccgtttgttcaagttggggcacgatatcgttccccagtatccatgcctgttagaatttgagcacgagaatatacgtccacttttgacgtatttgctgaaagtttaaaggtggtgcaggatatttctcctacttctaactgtgatcaagtccg

SEQ ID NO: 116461 - DNA, 973 bp, Physcomitrella patens
  Intron number 1 from transcript Pp1s83_99V6.1 (locus Pp1s8 3_99V6) derived from phytozome v7.0 (chr-ID scaffold_83; p os 824920 to 825892)
tcgtttgtagccgccgccgttggtggtgaagctgggtgcgttcttatcctctgcctctcctgcgtggtacttgtttctcttcgtagtgttggtattaggcattgtttgattagtgccggtggcttgagttggttgaattaaccctgctgcggtgatgttgcgtgttgaatctagtgtaggattgggagtgatttcattcgaggtgaaccaatcatttggtggaatgtacgagtgcggaagggcttttgtccctccgcggtgtcgtctttgttgcgcgggagctgtggctctctacttagaattcgtcacacttaactaatgtcatctcgcgtctctttttccctcaatcctccgaggtggcccatatctagctgaaacgatgtcagctctcgtcttccatgccattgaaacccttcacaccaataatgttcaaaatttgctacacttgttcttttcacgaattagttaagggtttcagctggaaatatttgatctcctctctcgctccttgcgctattatggcaaagcacgaatgaagcgctgaaatttgtgtaattgtgttgtaatgcttcgtggttttaaccaaaacaagtgacatttttgtcacattcaagcttccctttggtcctttcttctgcacctcgcagtgcaaactctcatgacctagatgaatggtgttccaatgaattcgtctgaccctatccctgcttctattcttgattttggtatgtagaggccttaagctactaggtgatgtccggtgcacggtctgctgcagatggaaataactatgtacctttctatacatatattgagtcgtttgcgtgtcggttcttccggtgggatggagttctgcttgctttatgttgtactctatatttctacatggtcaaattgatgcaccctcaccgtattgtacattttgacgtgaatctcagatttgagaacgaagacaacgcagccatcgagatcg

SEQ ID NO: 116462 - DNA, 362 bp, Physcomitrella patens
  Intron number 2 from transcript Pp1s264_73V6.1 (locus Pp1s 264_73V6) derived from phytozome v7.0 (chr-ID scaffold_264 ; pos 571492 to 571853 reverse strand)
ccaagggcatcgtccttgagaaaatgtgagcgcatcttgcctcttactttgtttatgtaggtcaacagatcgtttttgatcttgtgaaatgtaatagagattgaagtatttgcgaattggcttagtttatagtggttagggttatgtaatttagggagctcttttgaacatcttgaaccctgagcttgcatctatctttcgcttaaaacgtgtttaatgaactcggcagtcttctcgttttacgaggacttcgagtgtctattgcccaattgtctctatgaaaccgccagcactgatcatttatcttttcctttttttgtttggcagcggtattgaggctaagcagcccaactctgctatcc

SEQ ID NO: 116463 - DNA, 993 bp, Physcomitrella patens
  Intron number 1 from transcript Pp1s183_61V6.1 (locus Pp1s 183_61V6) derived from phytozome v7.0 (chr-ID scaffold_183 ; pos 437329 to 438321 reverse strand)
gcgctgtagatttgaacagactgagcatcaatcatgtacgtaggctcatgggtcgatccttgaattcgagtgtgctgttgtttttcgttcgagattgagcatatatgaccacatttgtatatgggtctgtgtgatttgctgtcgcgaagcgtttcttagctctttagaaattttgggatattcaagtgttgattttatcttggaatttgagcaaatccgactattgggttcgtgttataggatgtactgcgacagatcgctaatgcgttatgtaacgcaactgagtttggaacgaggattgaaggactgtttgattgctctctcaaacaattatggtgtagcacgtttttttttgttgtttttgtttcgttggattccattcgtgcttgtgtgggagttaggggatcacgtatcgttaatggagaagaatctgcaacgatttctgtggtgatatgatgaatgtcgagggttcgcaggtctccgcttagctcaatacattgcgttgattaatcttgaacacaggttttaagatacactaaatgactgctgaaaagtaaggctatccgagttgcacttcagtattttgatctgtaggagggttttggcatgctgctcttagcagacacaaaccccagcctgtgatgtgatttggaattacaaaaccgcgggagcagagaactctaatgcgagtgcgtagctggaaatagcatagcatttagtttgtgcagtagtcttctcaaacgtaattactgttctctggattttgattgaatgcctgttatcaacagcgatcttaattagggttatgttataggagattcaatttacgcagaattctcgacactccaaactgggtctgtgtgatatgctgttgcggagttcgtatggattcgctgagttgggctgcttgttttcatggttgactaatgtggatacaatcgagattttgattctttcaatgaaaatcctacgttgtggatgaccaggtggtcg

SEQ ID NO: 116464 - DNA, 841 bp, Physcomitrella patens
  Intron number 1 from transcript Pp1s19_120V6.1 (locus Pp1s 19_120V6) derived from phytozome v7.0 (chr-ID scaffold_19; pos 817177 to 818017)
acacttcccatttcagtgacttgttatcaatcgaggtaagtgaattattttcagaaatatttacttctgttccctttctttgttttcaatatacatatatatatatatatatatatatgtatatatattcttccatcttgttactgatatggtgctttagctccccgagtagacagtgtttaggatgtgcacaccgtaaaatcatgaggaggcctactgaaagtgggggtgttgcaaggatgcattgtgcaaaattaaatgcaaattgtcttcaaaagaaacttggagtgcgtgatgttggagtcaacgtcgttgagtgccacaagattgtaggctccaggctctcaaaactgtctgcataaatacaaaataagaggtatccttttcatactgacatggacttcggtccactatctcagaatccactgtcgtcgaaagcataatgaatcaggacaagcaaataacacaaccatgcatcgatcatattcaaataatgaaagaacatatgtcaggataccgatagaagactaatcttgtaatggattcatgctgagatgcttacccaggtggttgtcacatattaaaaaacaagtaatacaaaactaccgaaattggggaaaatgtcccctgttgacagtgaagtagcgggaaagacaccagcggcccaaagactgacaaattctcttcagttcgagagaaaccatcgatgagaaatttgtctaagtagacctgaaagtcaaaatgttatggtttgaataatttatttttttctgaaattttgacttccgcaactcattcgtattcagactcaaactggatctctgcacggagcaagtcttca

SEQ ID NO: 116465 - DNA, 636 bp, Physcomitrella patens
  Intron number 1 from transcript Pp1s118_110V6.1 (locus Pp1 s118_110V6) derived from phytozome v7.0 (chr-ID scaffold_1 18; pos 562902 to 563537)
tctcgtctgtcagttcgattcttggtttttggttggtatgattttttgaaacctaactctacttgcctaccgaaatttatggagggttctcccgctttgcctggtttcttcggccatgaaatcgcaaggctgtggggttgccttgttgcattgtcattggttgccaaaataccaattatatatatatatatatatatatatatatatgtatatgtgtgtgtgtgtgttttgcagaagcagcatgattgtttcgcgagaatatatatatcggattaagcaccaacttgcatgctcatgatcactatgtttttccatgtgaaggttttggaatagatgccgttctcgtgctttcgctcatgtgtcaagtatttctcaatgtgtggtgcttgagttattttctgttattgagagcacgttttaggttaactggtatttgcaacaaccgttcttgatagaccagcctatagaaatcactcgtaccgtgccaagttcagtcggactttctccgtagtttacaatgactcgcgggcgtggattaggtttgtgcatgaaaagttttgagtttctgaagattgcttcatctttttagtttcatcgtgaatttctatcgattcacgtcgacgctgtgcgtgcaga

SEQ ID NO: 116466 - DNA, 1052 bp, Physcomitrella patens
  Intron number 1 from transcript Pp1s40_216V6.1 (locus Pp1s 40_216V6) derived from phytozome v7.0 (chr-ID scaffold_40; pos 1586755 to 1587806)
tgtcaccgctctctagcggcttctaacagttccaagtaatggattcatcctgctgttgcacccatttcactagtctctgttgttttcaacgtctgtttcatcacccgcttgcaggtttcgatgaatggcactgaattgtagtttttggcattctagttatgtaatcgtctactggtcgtttgttcttgtcgtctacgatcttgtttctttattgttgctgatgtttctgtcatgtgagacagtgtcaatcgcggtgcttgattgtaagtttgtaaaggtttttgcgcacgtctgtgagtgttttgattggtgctgcagctccgcgaactgtaatcctcgtgttgcctcatcgattccattctgaatttgtgtccactttgcaatcctgtcttgactgcaaagtttagtagttttagtgaggcgtgtagcgtcgagtttgtgttctcggttcttttcaatcatgatacaagctgcttctagcagcctgtagcatgtatccaaaacgagaaggcgagttgcaagcaggatgtaattggaattcagaatgctttaaaatcccggtccagttttagaatgaacatgtaattgcactagtctcgatgaccatcttctacagtttcgccatattaagtttccactctttcgacttctcactcggaaacaattttagcaatcgcgactcttccattccggtgaaattctgaatccttgaaaaccttatttagcccaatcaaaagcaagatgtgctacaaaagcctgcggatcgtctagtgaatgctctggtttcctaaaattagtcgaaacaggtttagtcgtcgagacaattggaacgcgtcagggaaggccccaaaattgcaacagtttgtgaagctgaagattgacgagattgatcgatccaacgcccggcgatcattcgatgatgtttttttgtattttgcagggctgactgaaaccgtgcctgttccgagtccaagtggttcgagtcatcgcagcaagggcattaacctcttgatgttgcacgctctgcgcagattgtccacaagctgatagcc

SEQ ID NO: 116467 - DNA, 569 bp, Physcomitrella patens
  Intron number 2 from transcript Pp1s169_81V6.1 (locus Pp1s 169_81V6) derived from phytozome v7.0 (chr-ID scaffold_169 ; pos 439952 to 440520)
ttcttctgaggttggtgctttataattcggttcttgatatttgatttccattttaataggtaactctgttttgcgaggtattataggttgcagtttaggttaatcaagtttgatgttgtcgatatccgctcgtttttgggcaaagtcatcttgttacacagtggatttcctcaggtgggtattccgtcaccgaaaaagtagtagtggagtttgatcttcatctgattattaccatttaattgtgcactacttgaggacaaggacattcaggacaaagtattgttcttggtgtagttttgaaactcataatatacgatagccaaagtggggagtttctatgaggcttgtggtcgaactatttagtgctgatctgttctggggatgattttcttttttcttccagaagtacgaaatagagcataagtccttacatgtcgaccttggtttcttagtgggcaaagtgttatctagacattaatttcagtgcttaatgttcttgtactgaaaacgtaacttgaattgttgtaaatttcgtttcttcctatgcaggtttatcaaggcaaggaaat

SEQ ID NO: 116468 - DNA, 926 bp, Physcomitrella patens
  Intron number 1 from transcript Pp1s34_322V6.1 (locus Pp1s 34_322V6) derived from phytozome v7.0 (chr-ID scaffold_34; pos 1652821 to 1653746)
tggtgacgcaattttcctgcttacaatcgaagcgtgatggtttcatttcgtgctgggaatcacacctggagttttctgagagaacggtattgtgagggttgaatgagttgaatggaaacgaagaatatcaaagaaggtttgtctaagaatgagtcagtgttgttgtctgcgttgcttgtttaaagctcattttggtaaaaaattattttctcttcaagtacttgagtgaaatttgataaagtgtttttgaaggcggtggtggaggtttgctttgtgttgattgtgttgaagaggatttgtatcaagaagaagcagttcattgattgattgttgattgattgattgaacaaccactaacagtatgaggtggcaccaaagctccagaagcgatcattttacataaatcttccagaaattcagggtcaataatatgcatttggatttttttttttttttttttttttttttttggagtaacttaaaatcaaatcacaaaacaaacggacagacaaattgttgaaaccaagttcgaatttttagtttcttttctgaaaagttcaaaaatataaatgtgattttaattttataaacaatcaacaaaataaaataaaaatgaatcattgtaatgtcattgcattagccgtttccaagtctacccatttggatacaaatgcaaagcagtaaagagttgtgttaaaaaaattacaaatgtacatacatatacacatacatacacactcacacacagaaactaaaataaaaataaaaacgaaggaaagaaaccttaatattcatcttcaacattgaatactcattgagaatcaaagcaaaatttcaatctgtagaaacaagtaaaaaaccacaacaaaataaaataatcatgtggaacagagtgcccattacagcaactggaacgaacgaagcag

SEQ ID NO: 116469 - DNA, 320 bp, Physcomitrella patens
  Intron number 1 from transcript Pp1s13_332V6.1 (locus Pp1s 13_332V6) derived from phytozome v7.0 (chr-ID scaffold_13; pos 2183296 to 2183615 reverse strand)
gaaggtattcgtgctcatcctatgtctgggtactgagcatagatcttgtgtcatggttgattagaagttctttcttttctccacttttttgattgattgattgatttttagagttaaaaaatcgaaaatcatgaaggaggaaatagatatttctttgttagtttgcgcatgatcccttatcgtcaacagtaattttgtggtgatgcagaaaacagaggacttgcttttgatttaaggaacttaatgttttgtttatattttttttacattttgtttatttaaaatctcagtcatgtttttcatgccttaatttgatgcag

SEQ ID NO: 116470 - DNA, 571 bp, Physcomitrella patens
  Intron number 2 from transcript Pp1s368_36V6.1 (locus Pp1s 368_36V6) derived from phytozome v7.0 (chr-ID scaffold_368 ; pos 363643 to 364213)
tcgtcttcgggcgaatcggtcagtaatcgagataactctttgatttgcttggttttgggattgaattaagatcgattggtgtaagctttcggtgattgcggagtccttattcccgcatcggctttgtttatgacgtgttcatgttcattgtcgtaggagacttacacagggcagccgagcaccagctgatttgcctagcattcagggcaaacttttattttcatttttatttactgttgccaatacactttggaatcggaaaagctaccgtctaaatttaatgctgagagcgtgagagagacggaactgctttactaaagagagtgttggactgttagagaaggtagaaaattactggacttgaccgtcaaatcttagtatgccatcttgaatttgcaccgcattgggcccaagaccgagaaggagggagtggttaggatatacaagctaggagcagaacgaaacctggacatcatgtgaagaaatcccattgggatttctatgctgaatgcgaagtttaattcgtttgtgcacagattactgtccgagaggctctaaacagtgccatcga

SEQ ID NO: 116471 - DNA, 783 bp, Physcomitrella patens
  Intron number 1 from transcript Pp1s55_244V6.1 (locus Pp1s 55_244V6) derived from phytozome v7.0 (chr-ID scaffold_55; pos 1557405 to 1558187 reverse strand)
ctttatttgacaagctgcaaagacagcactcgcaggtgtgatatccttattatttagaggatttttttggtttcctctgcattttttatgtgcgccatgtgagatttagaggggattatatgccttggttcgacacgcctggtttggtgttgattcaattaggttagagtgatttagaagtgctttgcgcttttcgttggtgatatgggttccttaaatttcgcagcaacataagagtaagcgatcgataggagtacttcaggagaattaggaaggatttcaaaattgaattcgtggaaaatgtagaaactgttttatctttttcatgttgtggaattcttctgtgtttctgatccttttaacgcgtccatcgctattaggaatcatctttctttcttttattttgatattttcaatatttagttgaaaggagtcctagtgagtttgcgcttgccttcgtttcgattaggtagaggaaatgttccagaggatgagaatttggaatcgagcaggacctttcgatttgtgagaattttatttagctgttacatttttgttgatttcaggtagtctgctattcacacgattaattcggtggaatcagatcaatggtagataatagttgtttaaatctctgataatcgaaaccctgcataatgcttttcaattgtctgatatggcgacttctgctagcctttgccgaaacattatttttgcttctctagaagatgctgataagatctgtcttgagacaggttcgcttcctcgctgttctacttattg

SEQ ID NO: 116472 - DNA, 914 bp, Physcomitrella patens
  Intron number 1 from transcript Pp1s14_334V6.1 (locus Pp1s 14_334V6) derived from phytozome v7.0 (chr-ID scaffold_14; pos 2059264 to 2060177 reverse strand)
cagaagtgaggagtgattccccacattccttcggatatgcattggtttggagaacccagtctttcttttctttctgttttcccttttctttatactttcctctttgtttttcctccttcactcatcctgcatgtctagttcgaggaaaaaaaaacatattctattgatgaagttgttattttgtttgattacttgtttgtttgaacttccggaaaaatcgatctggaactcaaaaaccaatactatcagaaccatcagagtgcgtgtgtgtgtttgtgtgtatttttatataatttttttaaaaaaatttgttctttcttcctattttttttaattaccaggccagtcagattctttcgttatgacttcaagcgttgggacttgggtttcctaagctcagcaggtttccgatcccctaactctctagaatcatagtcttccgacacagtcccttcacctcttcggtacttgcttgttgacgtgagtctatagccccgagtgccctctgatttcgtcatatatatatatatatatatatatatatattatgctgatctttgtcgtaagtcgtctgaatctggttcaagcgatcagaatgcactgttgaaataattactgcaacttcgtcacatctcggacacattttagttacgaatactctagtgttgagccagaacccgaatctagacacaatgtagaaaacctgaagaatgccgatagattgatcagtgtctcagcctactctcagcctcctcctacaacatgtttgaatatggaaaactcactcgacaggaaatgatgcaagttgcaatacatggggctcctcctgttggctcaaaatgcttttgtttacaactcctgcatgattctgtgtggcaggggcgccggtccaacactggaggtcaagctactgt

SEQ ID NO: 116473 - DNA, 1053 bp, Physcomitrella patens
  Intron number 1 from transcript Pp1s255_41V6.2 (locus Pp1s 255_41V6) derived from phytozome v7.0 (chr-ID scaffold_255 ; pos 476482 to 477534)
ccctgcacactgcgggattgttcttcctcccctaggtgagatatcagagactctgatacttttcaggtgactgccggtgtgagtgtgggaattggtccttgtggtatggttctcgcagttgcgatgattttttttgtttgtttgtttgtttgtttgtttgtttgtttgtttgtttttttttttttttttttttcttgtctgttaattcccaggcacgctgggagttggcttgatattttttgttctggttgtatggagctgatcgtctacataatcttgcaccggtgagaatctagcgttcgaggtgatgctcggaagccataggctcgatcggcacactgtacgctattcaaacagactctcacctgagtgtattgatgttgtaattctgtcattggttgatagtagtatgaagagtctctaggagagctgcagaggacagaatacacgagagtagcttgtttttccatcctcacgatcaagctgaatgcgtgttcacagtaggccaagatgacgagtagacctgttttcagtgcacttttgtgacaccttgttagacatcgcctctcagtaagttgcactcgtgatgctattgcatttcgtgcagtttttattttattttattttattttaaattggaagaagcgtctcacgtctagcctaaattggttttggggagtgaaccaaggcatgtgtcctgtcaaactgaagcatgtcacatgcttaattttccaccacatcagtgaagaattcttttgcttgtgtttatgtacatgtttgaagaacagttgatcataagatgagcatttagctggtcaaaaaggttaggcagtatgaacttggatccagaacttttctcatttgtcagctcctcgggggcggacatcttgcattttaggtcgtgtacggttattcttgcgatattttcttgctggaatttgggtacttggtgtagtggcttaagggtggaggatgtttttggggaatgattactatgtagatatgttcttgtttgcaggtattgacaattttgaaattcataacagccattca

SEQ ID NO: 116474 - DNA, 573 bp, Physcomitrella patens
  Intron number 1 from transcript Pp1s25_82V6.1 (locus Pp1s2 5_82V6) derived from phytozome v7.0 (chr-ID scaffold_25; p os 626038 to 626610)
tattcaaggtaagaatgaaaagtcaaggaatatttctctctatatacagatatgcatataactccaattttcacatggaaggttgaattgggttcatgaaagcaaattgtctatcagcaactcatattttaaccatgattttaacaatctgtactttttgtttggttccatgttttgagcttatttttcatcatatatatgcacatatacatgcacacaaaatcaatcatagtaaatataactttagttcagaaaatgattttgatgaaattgcattatgcatgacttgcagagaaaaccaagtgaagttgtagaagcaaaattgcatccacaggtgtcatatggtgatggctctatcaggacaaagcctcacatcattgagcatcataatttttgcgacaaaaagtatttggtaactgtttaacaaatgtttttaattcagaatattattgtgctccaatgatttgctgaaaaagcattgcagagccaaattagaagattagctggatcatgttgctttggtttttgatgctgataggaatcatcttttgtgaagaaagattgccccctgtt

SEQ ID NO: 116475 - DNA, 998 bp, Physcomitrella patens
  Intron number 2 from transcript Pp1s126_11V6.1 (locus Pp1s 126_11V6) derived from phytozome v7.0 (chr-ID scaffold_126 ; pos 33761 to 34758 reverse strand)
cacattctgtcacctcgtccacttctgtttggattgtaagtgttgtccagtacactccagattgtgaggaacaaatcaaatgtaccgattaagctactctcctttggctcaaaaatcataatccctctccttttcgaggtctcttgatacgtcattaattaagaccttgttgagctggccatgttgtggaacaaagataactcattgtcacactaacgtgcagatgccatttcatatgtgttcgtttcgttgattgtgggttacagctggttgtcgagagattgcgatcattctttcactacaaaaaaattgctacagaactgagaaatgacgagctcttttttagcttttctatgtgttcctgcaagcaaggcacacactcaaggattcctaatcaactgcttgtcaatgacccacattgcgaaatctttgtggagtgtaggagttgcccttggagataggaccctctctggaagccagaagggtggagattaatgggccacagtgtagttggagtaaagagaacagcaatcacgaaatcttaatgttccttctgctatcactagaaaatttcccgatataccactgatattattagaatattctcctcactgtaaccgccactagagtactgcctattgagcccccttccaaagttcttgtctgctttttcttcttctttttgttttgtttggtctgtttccttttcaattttagtggctgtttgtcattatgccctaccttttcctagagattcactcgtgtcaaacaagtataacactatagtgcgtcacctggattcagggcagtacacctttagacgctcagtcgttctacgtcatttcttcgtttgttcaacctcagaatttgaactcgaaacagagtgaaggaggttatgttcttctcctcattgtttctgtattacttttcatttagttttttaatttgttactatgtgtgcagtttgtttcaccggtacaaggcctctcaagttcaat

SEQ ID NO: 116476 - DNA, 950 bp, Physcomitrella patens
  Intron number 1 from transcript Pp1s208_104V6.1 (locus Pp1 s208_104V6) derived from phytozome v7.0 (chr-ID scaffold_2 08; pos 438527 to 439476 reverse strand)
tggcgcttgctgcggagcggtcaagctacccgcaggttcgagatcaatctttgttttttctttttttttctttttttgaaaaaatatctccggaatgcacattctgtagacaatagagctgtttagccccccgtgagtttgtcttccaggatgttgcagacagtgtggttgtgggttggatgtaattttatacttgccattcttgtcacactagagatggtaatttcttcattagtaaagaactcacaaagtaacaaaacttcattatctggctccttcattagttctcgattgggtttaaagctaactctcttaagagcttgatgcacctaggaatgtacactcacaatagaagtagttttgtatcgtgaaatgttgtagtgttttttcaaaattggtcaattatttctaatataagtgtagcaatttttttgggtggcaatgcagtgcttagttcgtaagttaaatttcttgtacattgaggctggtaatagagtatttatgccccttgtcactgggttttgctgtccgaaaataacattctctggttgtgcagggataagcatctagcaaattgatgaagaaaagaaaggaaatactgataaacaggaatcaattgtgtgacttttacacaaagccatcgtgctggggcgttacagtgggcatgaatttatacgtttgcgcaaaattgtaatgtgtagctgaattattaaatgcacggaagaatatgtgtcaaactgccacatttttatttttaaccatgaatcaacgctgcagtgggtcttcaaaatttctcgagagcttgaaatttcgttgaagatttaggttactagttgcccagaaagtgacaaatgctgtatattctactggtgtcttactctgtctcgaatgcttgatgagtctctcagttcctagcttgataatgtattgataggtacctggaggttaaa

SEQ ID NO: 116477 - DNA, 889 bp, Physcomitrella patens
  Intron number 2 from transcript Pp1s105_252V6.1 (locus Pp1 s105_252V6) derived from phytozome v7.0 (chr-ID scaffold_1 05; pos 1369548 to 1370436)
ttatcggtaatgaccttaaattgtttatctccatgtcgatgtgtccttgctcgttggatggcacaacagtacattagagtgattctcaagatatttgtagttcggattgcctgatctcgttactgaagcggccattttgacgttgcttcgttatgacgcccaagtctcgtacgatctatgtataaccctttaattttcgttttgaagactctgatactaaagagacaccagctagacatccgactccaaatgatcaggaaacagattgtatcaaacaaactgccacggagttggatattttggaagcatgctggagtttagaacaggttttgacaacttgtctcatgacccgttttagagtactgattcatattctgtgaaaattcctgggcattatacatctgatgataaagtccagccacttaattgaccatgtttatgctcatttacctggggcacacgcaatggaagacagtaaattggcgaaagagcacatcacttagtattcaattgtgactgcagttggtccaatttttttttataaaaagatcaccaagcagaatactaattggttattccagcatccccagtttgaattctgatgactgaacaatccttagtcttcgactctcgctgggcgagtaagattagtatgcttgcgcagatgattcaattatcttcggagaattagagacttgtttttcaaacatcgctatcatcgtgttgcctttggttagatatgtgtggcagctgataattttttttgtcagattgcctctgagttttcaaatttccatctgttccaatgcaacgatgtttgttttcaagaatattatcgagcataattagggtgtgacttctacgatgcgtgtaggtactgagagaagca

SEQ ID NO: 116478 - DNA, 446 bp, Physcomitrella patens
  Intron number 4 from transcript Pp1s245_10V6.1 (locus Pp1s 245_10V6) derived from phytozome v7.0 (chr-ID scaffold_245 ; pos 31895 to 32340)
gcgcccttggctgagcgacttggtttcgttacagagtgagttgctcttggctttttatggattagttttccttatttctccatcgctattcttgtcatttcacaacagttttttttttttttttttttttttttttttttgtttttgtttttgtgtggatgaacatataactatggttatgttgaacctagaaataaagttctgccttggtagtgagaagatacaccctgtctgctgcagctatcgtctacttttcgctcacttcaggtgtttacaagttggtagtgtattctggacctattgttaatgttttggttcgagaaaggagacgcacaagttaggaaacttgatgcgaaggaactaaaacagataatcgaagtattttaacaagacgtgtttcgacatttgcaggcaactatcattctccaccggttcaacaggtattt

SEQ ID NO: 116479 - DNA, 770 bp, Physcomitrella patens
  Intron number 4 from transcript Pp1s83_97V6.1 (locus Pp1s8 3_97V6) derived from phytozome v7.0 (chr-ID scaffold_83; p os 794674 to 795443)
tccctcctctgaccatagctgccaaaggtcagcaggtactgtcttttgctttccagtttctgtccacctccaacccccgattcctttgagttgtgggatggacccagcaaaaacaaacagcaatttgaagcagatattatttatttatttagtgtatgtactgtgtgatggtcgtagcctggcggtgtatcaaacggtctggaccgcaagggtccatgtaaacttaatcaacactaaaacatgataaataaccattccctccgacatatattgcacttctacatgttttagatcctttcaatatgaaatcttcaagataaacatctgcgatggcgacatttgattgactgattctcaccgatgttttgaatgctaggtctgctcgggttgtgcagtttaaactttccttattgaaaagattaacgattgttttacgacattacacatggtcttttcaaaatcgtctgatggaaatagggacacgttttattgtagtagtctttgtgggtttagtgcgtcgcgagtgccccaatctcaacatcttttagcttaaaattatccctctttttacttgagcatttttatgttacgtctacctctgagctttaattagatttaagtatcaactttacggataggcactctgttcatttctgtgtgttcttttggtaaatctgtctgttatttagctgaacagtgcctctcagtaatataatatggctctgatcattacaggtctcagtccgatttcctgtctctccctcgtgtga

SEQ ID NO: 116480 - DNA, 713 bp, Physcomitrella patens
  Intron number 2 from transcript Pp1s167_67V6.1 (locus Pp1s 167_67V6) derived from phytozome v7.0 (chr-ID scaffold_167 ; pos 311673 to 312385)
tgtaacaataccagaaggaaaaggtgagtttcgtgctaatctactgatggaaccgacaatgaaagaatcagagaatataaaaacaaggagtttcgagtgaagtaacggcgacaagagaatcttgtcatagatgaatattttactggtaagcaaagtcgatggtgccgtaagtcacttatcctcctgagattcaggaatattaagactgattctgctcacatcatgtctccagagagtcaaagtatgagtaaggatcaatcatgcaatcgacacttccaaataacgaacttcagtaacaagaaaagctgtctcgaatttaaaatgaacagaatattacaacatcgtcaaagctgcgggtctttcaccatctgaagagatgatcatggatgcctatttaatactaaaaatacaagtagaaataaatggtctaggatcctgatcgattggaatcaaggtctgaacagtctcgtctactaatatatgctaaactcaccggctggggagtacagagatttgtctgagtctctttctcatttcactcttcaaggccaagcttgacaacatcccttatcaaccacttcgcatctaccttgcgttctggcagcaattagtacatgagcttatgagataaattctcaatattatgatgcttttgattggccacttcatcttaattgatgttgccagagaacttgattgccagactgctgtaa

SEQ ID NO: 116481 - DNA, 1006 bp, Physcomitrella patens
  Intron number 1 from transcript Pp1s78_55V6.1 (locus Pp1s7 8_55V6) derived from phytozome v7.0 (chr-ID scaffold_78; p os 291999 to 293004)
tttagctcagtatccgctgtggacagaggcatcgggtgcgcgcttcctatattccaattttgtgcaaattcgcaaaatgtctttcaatttctgtgattaggtattatgttgaacacgtggtcgtgcagacgctttgaagcgatgcccttgacaaatgttgtattggacttgggttttcgtacagttgatgcaattctgtttcaggatgcagcttctattataacgtttacattttcagtttattttttcgaagtaggcttctggatgtgatcgtgcgacagagatactcctggtgtaattcatgctcgcgcgcaatagttgcacatgaccataggcaaatcgctttgaaagagtcttagagaccactcattcagttagaggtacctcaagagtgcacagtttttcgactgtaggtcggattcagacaatgtgcagacgctaactgatagaggcgatattctgtgctacaaattatctactgtttcaaatttgcttacgaattgttttgctttttgtaacacaccactagcacactctttagatcttgctgacttagtgcacatgtgagtagtttgttcactaagaacttcatcttgcttcttccatgaggccattttcaaatgcttattttggtgggaaagggatcgcaatcttagtggtattatcaatctcacttcaagtattgaaaattttgaaggtttctaaagtcctcgtatcaaacaagaacgtggtttgcacttttgagatgattgattctctctgagatgttcttcgttttgcacagggttttgttcgatttgagctagaaagttatcatcatgaccatcattcctgaaagaataatatattaacattattctgtaattggattttctcattttaactaaaattttccctctggtgctgctctgtttcatatttcctgcaactttcttgcgtaccggacaggagatcatcttgtaacagaccgatgttcgtgtgtttgcacaggtttgagcatatttgt

SEQ ID NO: 116482 - DNA, 716 bp, Physcomitrella patens
  Intron number 1 from transcript Pp1s242_7V6.1 (locus Pp1s2 42_7V6) derived from phytozome v7.0 (chr-ID scaffold_242; pos 105032 to 105747)
tgcgtgtcactggtacgcttctgctcttgctccactctatgcttgtaggctttctttttctttagggtttttcctgttttccgcgaagagtgttatgcgtttggttcgatgtggtgtatgcgctgtttgtactgactttgagtgggtcgttgtgtttcgtttttctcttttgctagctacttttctttgggttttggtattgtgttttctccaatgctgcaactgttttattcgggttggtggaattccttgaggttttacgacagtttgcgaccaatgtagacggttaaacatgttcaatttagagtgtgagtcttgattttctgggtttttttgcacatgattgtcactcttcatggagtgatatcgatctgtttccgatcatgtgactgattgtgatgaatgtgaggtttactttgattggtcgcaaaacttaagttcaaatggggtgacagaatatttttggttctgaatgtgcgcttggttgcagtttgtattccttgtacctgctcgtggaactgaaactaagttgtggttgttttcatcctttgtgataaactcgaatgctaagagttgatgtctgaattatgatatgcggaggattacgttcagtgttttctgaattattccagtgattgatacgtgatactacaattacttaatttgatcgctgcgttgcaggaggagaggtgggtgctgcctcatcacttgcacct

SEQ ID NO: 116483 - DNA, 805 bp, Physcomitrella patens
  Intron number 1 from transcript Pp1s234_84V6.1 (locus Pp1s 234_84V6) derived from phytozome v7.0 (chr-ID scaffold_234 ; pos 552589 to 553393)
ctgttggcttcgttcaatatctgggtaatttaatgcaatcctctcagttccatctgcaccttctccgatcacacagctgatatcctctatgtgataattcaaagatcactatcctgtgaccacgtcgatcattgcgacgttctacataaacccagcttataagctgtgtcttggaaaacgctgccaattgaactacactcgagcggttcagacaaagcagtctacctcgagacgaatgcaataaaaactgggtcttcgcttctcacgttctgtcatgtgagcgaaacgaatttgaaagaagcgctgaaatcgagtgctagattcacgcagggacaagttaagagcttcaagaggcctcgtgtcttttatccctttcgtaagcaattaacagcagctgcgggactgtgggatgacgagtacttaaattgcgtcatggaaggcatgccctcatattgacgaggcttgatgttgtacgaaaatttcgttaggggaggatcggtctcatgccgtggtggtgtaacaatgattttctgtgatgtccatgcttgcactgatgtctggaaatctgttgtaaacaatgtgaccggagattaacaaggtttctactgacgaggagtatcaccgaacaactccactttccaacttcgaacttttgctgagtcagataacatctgctgcacatccagtttctcagaaagtgtacaacctagcctggacgacaacctttcaccttctgcaatacatgcaaataaaacataaaggctttgtatctaacacttctaagttttaaaaggaggtgaagttt

SEQ ID NO: 116484 - DNA, 1020 bp, Physcomitrella patens
  Intron number 1 from transcript Pp1s364_59V6.1 (locus Pp1s 364_59V6) derived from phytozome v7.0 (chr-ID scaffold_364 ; pos 316362 to 317381 reverse strand)
agttggggtgacggcgtgactggaatagcgagctggtacttccttcccctctctatttgagctttttggtaggggcactactgtcagtcttgtttacgagacacgtgagcagctgggttttagtggaattgtgtttgtggttccgtgactgttgattgttatgtggtgtcttggtttgcaattttggcgacgcttggatgtcgagggcatgcttttggtggtaccttaggtcttactcttgcgaatgggtttgcttagcatgcctggaaatagagcggatctttagagcgtatatgcatgcactcatgtgaggcctaattggtttatgttcgtgaggcttgacgtgttttgaatgaccctgtatcatttcttgtcactagctattttttcatactttatacttgctggttttctgctgacggtgtggttaatgtgagaagtcgcatgaaattgtttaatttcatttttataagatttgttctcttgctaatcacgcccaaatattctgaatagaatgaagtttctttgatgtacatagaaaattacggagcattcggtgcctggaatgtcgtacgtccacatgcggtgattcgcaatctgctatttgatttggaatttctctgttagtaccagcactatgcagttctccggagatagtagttgaaaatgcacgtattatctgtagctgcctatcctctccttcgggtagtgtaatttgtcattagttgtgggtaggaatgatgtggctctactaacactaagagccgggaatcgatgagagtgcttagctggcttctgtgattttccgacatcaattttgggtactttttgtcttatgaactgtgcacgttcacgagaatttttttgcttactatggcagcgtagtaccagttacttgatggccggtatgtaggagtctgaatgaagttcccatcaaacttaaaccttttggggtgtgttcaggtatcgcgtggagcatacatcatatcatttgttctctcacctataaagtttatagcc

SEQ ID NO: 116485 - DNA, 503 bp, Physcomitrella patens
  Intron number 1 from transcript Pp1s19_184V6.1 (locus Pp1s 19_184V6) derived from phytozome v7.0 (chr-ID scaffold_19; pos 1263644 to 1264146)
aaagtatattcatctctttgtgttgtggtgaagcagtatgaattccatctccaatgcagcattttgtcatttacttgttttgtgacattggcactggattagtttgtaatttcaccatggcatgtatgttttagtcatttttacttcaagatgatgatttccaagtcaaattttgctactgtttatcattcagttatacacttaacttgcttaaaccaaagtatgtattctggttgttggtgtagttcttttccacggtagaggagtcttgaactactttgtcgcaccgatttctctaaacggttgtctttctagcctcctgtgtacaactgaaccattttcacctggttcactagtacaatcctgcaaagagcatgtggatcctatgcttgcatacacactttatgtggatattgatgccgctacgatgtattttttactttcctactattccgttgttcttgtttgcttgttgacacctacgcggttcattttcatcacag

SEQ ID NO: 116486 - DNA, 836 bp, Physcomitrella patens
  Intron number 1 from transcript Pp1s34_235V6.1 (locus Pp1s 34_235V6) derived from phytozome v7.0 (chr-ID scaffold_34; pos 1218936 to 1219771 reverse strand)
attcttggaggggtttcctcactggtcgttgattggtaggttggattcatccccgactaggattgttgggttgcttgtgattgtaattggggtccgtttttattattattatgatggtgatgatgttgcttattgttattattattaatatgtcagtggccttcgtcgagctatatccgaattagtgcgaacgagtttcattagctgctcgtgaagagaattagccctgaacaggagtggcttttttacgtttttaggttcagttactacagtaatcggttgtcttatttttgtttactcgaccaaaaatttgtgttccagaggaggtccaatgcagacttttttttttttttttttttttttttttttttccgattgtgactgtggttggagagcgtgagtcagattatgctacagagctggacaccaccatatccgattctacattgagatgtgtaatttctcattggcatcaattgttttggagactgtgcagtgagggtaggatttcgatcatctacttacaaaacagacacactcatggttaagatgtgttttctctgagacattgtgagataacattcaagaattgagaataagatgtgccgtaatgcaatattaacaagaatatcgtttttttttgtattcctattgcaacattttgacctggtcgatttcctgaacattgagaccttcaagcaggtggatttaatccatttggctgattttttacttacagaaagtaatttttttgatgtatggtcttgcctctgaatttctcggtgtgattaagggatccagctctttaattgcgtgatcacaaataagtggctgcg

SEQ ID NO: 116487 - DNA, 816 bp, Physcomitrella patens
  Intron number 1 from transcript Pp1s133_53V6.1 (locus Pp1s 133_53V6) derived from phytozome v7.0 (chr-ID scaffold_133 ; pos 341916 to 342731)
aaaacctggtaaccctcaaagatcaccacctttcgcactaagcttgtatttcattcctcaaaacacgatttttagggtttctttgtttgtgggtgcatttgaagaatactacacaacagattgcctccctggtttgtgaactatacgcttgtcagtgactctaatcatgcactttgatgacctagtgatgagatgacgccataaccaaaactgattccaaaaacccacattctagttgtatcctacttggctaatagcttcgcttcatagcaaaacatgagtcagacatgaattctctatttcatcttctgagttgcaaatcacgacgcttctgaatctgcgtcttcaaggttgctcccactagtctcagactagtctttcaggctcggattgttaatcagcgtcgctagctagatcgtgaggcggagcttgtcgaaacaatccttggaccctaggcttgtttcgctgtcgaagtcttatcattttccttaagttttatggcatatgttgtcctagtgcatatggcgttttgcatcatcttgattgttcgactgttcgtatcaccagaaacctagaacattggacctctcgttgtgagttacaatggctatctagtgtttctagcatgccttgccgttcatactacgaaattatcataagatgtagctactacattactagctaaacatacttgtcatgtataacaatctatgatcctaatcaacctctagatctgaatgttgttttgcataccgtttgattagttcgcgttcggttgcagctctctgcaaatctggaagactggccggggcgtca

SEQ ID NO: 116488 - DNA, 354 bp, Physcomitrella patens
  Intron number 2 from transcript Pp1s83_164V6.1 (locus Pp1s 83_164V6) derived from phytozome v7.0 (chr-ID scaffold_83; pos 1164757 to 1165110)
attgccgattccaccgctacaagtcgatctatcgggtgcttttaaaaactgcgtttttgtctaccttgctttgatttttagcatgtatttatcatgtttttcacattgccaatctcttccaacattttattgttattgtttgagcacgctgagaggtatgcttggccattaaatattcttgattactaaatttcacatcttttcattttggtgatcagaagagtagttcatgaagttatttttcaaatcaaaaaaatgttgtgaagaagaaaattagtcgaataactacatttctctccaaaaaatagcgatgcagttagttgttcctcaaatgctgaatttctgatggcgcag

SEQ ID NO: 116489 - DNA, 520 bp, Physcomitrella patens
  Intron number 1 from transcript Pp1s19_64V6.1 (locus Pp1s1 9_64V6) derived from phytozome v7.0 (chr-ID scaffold_19; p os 479324 to 479843)
tttgaagaattggaggacaaaacgcgccgtatttggtaaatggggaacgagttgtgttttcttttcgaaagaaattattcttatctttgccgctgtgatttttgtttatattcattttccttcagtgttctcttttgtgaagacgatgcgtgtatgttgctgtttgacgttgtcttagtttcttagttcatttattgtctagctagctggttggtaatacgagggacccgtgcaaaacacgaggaggaatgttttctagacattggtagtagcgagaccgtattgtctagggtcaggtattaatcatggaatttgttggtacattgagttgtaactgctttgatgtacctccgtagtgtagcttttccggaaatgggacgcaccttactttgaagctcaaatgaaacaatttagggctacagcaattctgacgagaagtcgtgagtgtgttttgaattgttgggctcggtctttgtagttgttgaaaagtgtaatgtgaaattgtgatgtgaaatcagaa

SEQ ID NO: 116490 - DNA, 966 bp, Physcomitrella patens; identical to SEQ ID NO: 116239
  Intron number 1 from transcript Pp1s92_76V6.4 (locus Pp1s9 2_76V6) derived from phytozome v7.0 (chr-ID scaffold_92; p os 929443 to 930408 reverse strand)

SEQ ID NO: 116491 - DNA, 717 bp, Physcomitrella patens
  Intron number 1 from transcript Pp1s220_84V6.1 (locus Pp1s 220_84V6) derived from phytozome v7.0 (chr-ID scaffold_220 ; pos 543097 to 543813)
ctctcacgtttcctctgttgtgattctaccttcaggtacccctcctcaggtacccctcctcaggtactcctcgatcgctgcgtgtttgcatgtctggaactggcctgtatcgccactagcttcgttgctttgccattgttgttttgacgattcttgtgtcgcgattgtggtaggggagagagaatcgtgattgggtgtagctaggttgattgagagtggaagaataatgtgtggagatggggttgtgaacttgagtttttctttttttggttttattttgcttgtcttggattgggtttcaggagggctgaggtttgagaggcggttgtagttgattgtagggtggggtactctggaggattgggctatactctaattttgagggtgtagtgaggaattggggtttagggttcactgtcgtgtaatgttgtagattgagtctcgtgtttggcttaatacaggaattggattggtactgaattgcgaactcgtcaagattgtttgtgtcgtgtgtctgcttcaccaaatagccgcttgtgttctgaagcaattgtaggagtctaggtggtttcgatgaacgtttcggtttgtccgtcttcatgaagcgcattcaagccaatcggtcgaagtttttagtcgggcattgtttttttttccttgtatagatgttttatattcaggtgatgcaggagcggtgttcacgcgtagtagagcacc

SEQ ID NO: 116492 - DNA, 1032 bp, Physcomitrella patens
  Intron number 1 from transcript Pp1s137_279V6.1 (locus Pp1 s137_279V6) derived from phytozome v7.0 (chr-ID scaffold_1 37; pos 1028764 to 1029795)
tttctgtcaccagttacggttaaccccccttttcctttttttctttttcttttctgggaaatctacccaagtaacagttctaggaacagctgggttccattagggcaaggcaccattgtccacgttttctatttcagttctaaggaaagcatcaaaggatcatccaagtggcttcaccgtaacacaaatagcgtaacataaaataaaaaacgaaaatggatctgatatctacattctctaggtctgggcttacaaatgtgtgcctcttttttctaacacccatttcatctttaaccgatattatctcttatagggttcttaatttgtattggaaatcttcgcaacatgggggtgaagtggtcctgagttttcgacaaggggaagatgacgacatagatgacaaacttggatgacacaaaaaaatgggtgcattctcccaatcattcccttgacgaggttcccgttccctgttccctgttcccaagggaacaaaacgtcgtgctgtgagtgcccctcaaaatttgacccaatttagcttccctataatttagccccctctttcacacactaatataatcctccaactaacccactcataccatcttgcactattctcacgcaggatcacaagcaaagttaccttccaacccgaatcttgtccgtttctaatcttgggcattaaaagaacacccagaatgctaatgtgcaatgatttggttcattagttgctaagcggaatgaggccaaacaaaaggacacctgtcatttccaccaaattgtcggtcactgcaggcctcttgttcatcaatgaacccacgagagagtttagataaagaactcgttaatgggcatgcaaattgtctagatttttattttgttttctgttttttgtttctttttttccccaccacaaaccctctcctgtacctccaatagtatctttttgctctccctcttgatattgtaccccacctaatacaatgccatttgaatacagtttgttgtgtccttcctgcctctggcctttggtct

SEQ ID NO: 116493 - DNA, 1017 bp, Physcomitrella patens
  Intron number 1 from transcript Pp1s188_79V6.1 (locus Pp1s 188_79V6) derived from phytozome v7.0 (chr-ID scaffold_188 ; pos 592604 to 593620)
aaatctcaagaggtaacggagctctccctcgcttgcaaatacctcattcgtccaagcttctcctttaaagcactataccagaagtacatttgaagtggaacataaaaatggatcgttgatgtgataaattttctatttacatttgcacattcaactcgtactctatttagcaactatagtatacaagcttcgaaagctggctttgaatatcttcataccctcataacgccagatcaattcatttttttttctatttttattatgttggtcttgtcgattttctgggcagatgatatcgtattctagacatgtcgatattctagaagctgaaaagtgaaactaatctctagaagcctaccccttcacatgatcagttattcttttttccttcctcctttccaactcaaatgcttggccagcttcgcgcatcatgcgtgtggtcagcaataagattcgaaccctcgccgattcacgttgcgagattgaagcggtttcacactgcatctgcatcaaggtcaaaagttgttggtttacgcccaggagtttccaacgggcagagggggacgggcagagagcagaagcatgaagagaaaattatataggatcagaggcagttaacatgcatggattccgagaagttgtgaaggtgggttcagtgaagtttcggcacacatgttccccggagatgctaatcacttgtagagtgggtcaacatctcgcccgaacccggctcgcttggaacagcatcagtgtgctccacgggcagcccgaaaaaaaactcattaactaaaatataacgtggtgccttgaacaccacggacaactaaatcgttcaatatcgttaagaccagaagtgacaaaaagaaggatacacgaaaaaacaagggaatattgtctctttttgcaatcaccatgatatcattcgtttgcatgtatgcgtatgaaccagttagtgtcacggaattagtatgtatatatatacatatgtttctgaatatgtacttcagttgggtcgac

SEQ ID NO: 116494 - DNA, 882 bp, Physcomitrella patens
  Intron number 1 from transcript Pp1s27_356V6.1 (locus Pp1s 27_356V6) derived from phytozome v7.0 (chr-ID scaffold_27; pos 2440261 to 2441142)
attcaggttcaggtacacattttgcgtatttctgtcttgatactgacgtcctgattttacttagagttctggtatagtagcttgaaacttgcgatatattatcgtattctctatgctgttgattcgttcttgagtcaatttctgtgatgatagcattgtacacttcagtaggtcttcttatttatcatcagtggtaatacagtttttgatgcaacacatacgcacttttgctgtgcttttccatcgtacagacgttgattgtggtttcttgttacttcaatcacatggtgaaacaaaagtgaattcatcctactcatcattgttgattcttaacttacgagattctgtcattttcccgtggcgtgcaggtgcaaatttcacacgtataatttggggtcttaataactaactcaatgcaaggcagtctatcagaggtaggtcgtagggatttggacgggaattagcttatctatgatgttttagaaatgtggtaaccactggctgtggttaagttggagatgtttaaggccatccttcagctgtcgtacagaatcagaagagttgatttgctagtgtcgagaaagaggttggtgattttgaaaataaaagagcatgtgcaagctcaatgctcaatctctcgacagaggtggctgttattctcattaatatttgatgctgcgatgagcattgttgtattgcatactgagtacaagattgtcacgtgcatggctgattatgaacagggttgattactttgaagggtttcattctcttcatgattcacgtggattttttgtgagacatgtagattagtaaagtgtttcttagccccctaaacacgttgcggtcattgcagctctggcctcggaaactacttaagaa

SEQ ID NO: 116495 - DNA, 553 bp, Physcomitrella patens
  Intron number 1 from transcript Pp1s61_297V6.1 (locus Pp1s 61_297V6) derived from phytozome v7.0 (chr-ID scaffold_61; pos 1626289 to 1626841 reverse strand)
aacggtgcggtttacagcacttttacctcgtacaggtgagaagtctggacttcacagccttatatgaaatgaatcctgtgggtcagtcattcccgtgaggcagaaaccttaactcgattttgtcttctgtttttttcttcgcgttttttttgtttgaatccagggttttggagtttagcaattgcggttttcgatgttctcaaattgcagtatatttcctctgaaaaagaatcagtcgctctaatttgatgtcttgcttcaacttggtcctgtttctaccgcaacacctagtgtcgcgtgaatttcataaccctcatcaacgtcgtttgttcatcgactgcattcctttactcctacacatttggtttaggggttgagtacgaagtgtctgggcataacatcgacagtagtggattcagcacattgatgattctgaccccgtaatagcttcaacccttgtatgtcgtcttccaagtgttggactctactgatcgtcttcaatgagtagctcatgcaacttgtttggatttctgcagtttcgtactcgctataa

SEQ ID NO: 116496 - DNA, 653 bp, Physcomitrella patens
  Intron number 1 from transcript Pp1s440_11V6.1 (locus Pp1s 440_11V6) derived from phytozome v7.0 (chr-ID scaffold_440 ; pos 91161 to 91813 reverse strand)
cagggccctaaagcccggcttgaccaggtgggttttgctcttctgttcttcgtccttttcctgctcttattgaaaaatgtccccattttgcttctttgtttttacatggactctcaagtatcaatcaatgccctggtcgttggtctggaaaaacaagagccattataccttctgaaaaatcttgtaacgtcggccactggtgtaactagccagaggtaggttttgattggggtaacatttcaactgttatttggagagttgccagaggcctcttaattagatgagggtatggttcaccttaatctggaaatcaccaggaaatttcaatctcgttattcgctttaccctctttcgctggacagaagaccacactcattcaaaatttgagtaattaatcatgtgtgtattcgcagacctcttaaatgacatcgattagggtcatagtgcttaagagactttgtgcaaaccctttcaaatttcagcattaacacatcttcctaagtttctgtcaatctttccagagaattctgtttgtgctaaaaatcaggtatctagttgcattctcacgtatttcagttgtgtcttaagctgcacgaaatttgagttctgaaaatctcatgtatgttttcagatatttccagcaagaaaagtaa

SEQ ID NO: 116497 - DNA, 756 bp, Physcomitrella patens
  Intron number 1 from transcript Pp1s351_31V6.1 (locus Pp1s 351_31V6) derived from phytozome v7.0 (chr-ID scaffold_351 ; pos 236244 to 236999)
ccagtcggtggctctgttaagaaggtgggaaattctcactcgcacgtcaaaagcttgtttgcactcaatcctcatatgaatgtaaaagaaagagagaaaaataaaaaaaattctgcttgtttactaatagtgatgctttcttgtcgattataactgtggctgctatgagctacgtaattggtgatcgttaattcgatccttggactgtggtatgatcgccgcgtgaactcgtatagcctacattattttaaactttaagaatcaaacagatgttgcatggaaagcattagtgggttgctactgttcttcacaatgagctgcgaatatgattccatagtcggttttgacagggggattgacagattgtcacccattcagcttctgtagagtaccattttggttgtttttaagtggttctcgtcagaacaacagtgagccagggaagaaagtgattcgtgaatgttttggttacgtttcttcgaacggttatgctcatcatggtatgctgtaatgatttgatgattggcctctatacgtttgattagaaggctgacttcatgtccctgcaaagttttgtcgcatgagctcttctagtggatccatgacatcctgaacaggtatgatgcgtttgatggagattgaggctggtgtagtggtaccatatgattctaggatacttgatcttatctgtattggtgaacttgtcttaactgtcatgtagctggacggagccattttaaatttagaagcaaaagt

SEQ ID NO: 116498 - DNA, 870 bp, Physcomitrella patens
  Intron number 2 from transcript Pp1s76_96V6.1 (locus Pp1s7 6_96V6) derived from phytozome v7.0 (chr-ID scaffold_76; p os 589292 to 590161)
cagcaagcaaaggtgcaccctccacgtttactttgttgaaccgtgctgaggttttgtggtattcatgaagtctaacgtttttactctgtttcctgaaattgttgggcaaccttgagttacatgtgagcgtttttgaacttctatttagtaatgatgaaaatgttgtttgactggcagaacattagctgacgagcgatcttgtttaaaggtctcggtttattgtgcagtatgtatgtccatgttgtttctagtatgctccgaacttgattaaaataaaggccagtgtttggggcatggtgaaggaaactaaggtctgagctgaagcacatgagcttgttctgtccgtgttgggtttaatatttgcttctaaggagatcttttaactgttcattctagacttgacaaacatgacattcgtaaggagagggtctactgcaatgcagaatgctcatattcagttgagattcgagttttccatattattggtcattttggtacaggggtaaaatacgtacttgagaatgtgttactcctggacttaataactcgggtagaagtatggacgttgacattttcgtgtataacaagatagcgaaactggcttcctgtttacatacaggttggtgctttgtgatgggaacgaatgctcgattgctagagttttgcaggtgtgtttagatgcggatttatcattgttgtatgattactacagaaatatttgtcttcaaagtctggggtatgtaaacctctctagagcctctattagactttgactgtgttcggctatttccttttacctttttaacgagaagttacctattatttttgttctcagccggtgtttttaaccaaggctcagagagcagagct

SEQ ID NO: 116499 - DNA, 568 bp, Physcomitrella patens
  Intron number 1 from transcript Pp1s249_74V6.1 (locus Pp1s 249_74V6) derived from phytozome v7.0 (chr-ID scaffold_249 ; pos 445995 to 446562 reverse strand)
tccaagccgcgcacctgggtcaggcaatcacggaggtcaaccgcatgattggttgtagccccccccccccaagttgtatgactatgtaattgatattgttgtgaattatggcgactggggggaataaatggtggggatttattgtgcaaagtgagcaatttcgcagctttgcgactgttgtgtagagaatttgaaataaatttgggatttctttttgagagcacagtgttgtttcatcttagacttggtcgattatataatggtgaccagtaatgtgcagcaggattttgttgagctcctttttcgatggtagccggatttttttcgtatgtttcttttggtcttctttctcacacagagaagtgtttggttttatcaattcagcttatgtagcttcaagacaatgtacagtccttaagagcgggtgaccaaatccatatacttcagtctaccttttgattgactggttagtttcttaatgtactagtattccgaatcgcggtccgaccttgttagctaatgacttaccgtggaattctgatgttgcagctggactggcggttgagtg

SEQ ID NO: 116500 - DNA, 584 bp, Physcomitrella patens; identical to SEQ ID NO: 116373
  Intron number 1 from transcript Pp1s13_289V6.3 (locus Pp1s 13_289V6) derived from phytozome v7.0 (chr-ID scaffold_13; pos 1909238 to 1909821)

SEQ ID NO: 116501 - DNA, 1022 bp, Physcomitrella patens
  Intron number 1 from transcript Pp1s125_107V6.1 (locus Pp1 s125_107V6) derived from phytozome v7.0 (chr-ID scaffold_1 25; pos 839712 to 840733)
tcttctggtgagaataatttccgctgaagatcttgatacatttttcttctaattgcttctttaatgctttgaaagaaagttcagcagatgatcccgtatttttcttgcctccttttttagggctgatcttaatcgcgtatagcattatctaaacacgaattttcttcttcgaaaaggttgcttggttggtgatttcatgccgaattgtctgtcatgttaatattcgcagtgcgtttgcggactgtctggacttcacttgatgtgactaatcaaatatcagatatggttcttgtatttgtggagatttgtatccttgagtaatgtggcaaatcaaattgtggtgtggggtttatcacatgtacttccactttattgcgtcagaaacccacactttagggttttgtggtaagttgtgggaagaatgaagtcatagttcgaaatgctcatgcatttgagaggatgttgaccgagtgattcgaggtgtctcagtctgtggtaacgtctgcaaataccttgtagcgtcttcgtggtcgattccaattggttctttttcagatgtttactttcacgtatccaaattcagtcctcgtgccggtgggcaatgggcaatactcaaggtttttgttaagttcattaaaaagacattttaaattcaaaattttcatattttaatatattctatgttcaacttagatcataacttgaaagcgaaagagagatttatggttccgggaaatattttttgctctctcctataaattgtgtgtatcttaaagatgtagaacccttggcctattttttcgtttggagtacttcatttatgattcgaggtgaatgtgagttttatttttggatttctgcctgtcatcttgctgcttcactttttcagattttgtagcatcgttagccgagatttttcctttgcatgttggtgaatgcctgctctaactctgttatgatacggccacactctaatggcaactgtaggagattattggtgctaaggatctggaacaccaaag

SEQ ID NO: 116502 - DNA, 648 bp, Physcomitrella patens
  Intron number 1 from transcript Pp1s40_10V6.1 (locus Pp1s4 0_10V6) derived from phytozome v7.0 (chr-ID scaffold_40; p os 48258 to 48905)
cagcggacgttgccactcgcgctcctgatttccaggtctgtggaattgtttgcattgcgagccatcttttcataaatttagctcagtgagtttgcgttgttttgctgctaaattcaggacagctatttactcatgtattcttcaacgtcaattatataggtttcgctccccatgcagggctcttggcttcatcgagatgaatattgtcgctatttactgaataatctgtgtatttcattgcaacgccttcagcggtgatttgaatatcagttgaaatgttacaataatgtgaaaacgtttgacatgtcgaacggtttgttctggcatgatattcaaagattttctttcgaatcaaacatagcttttaactttgtgaaacttatctacagcctaaatgtctgctttgacttcatattgcatgagtcattttaattttcgtagaaatcctgcaacagttcaattcaaagctttctacggcagtttgcggcgcgtgcaactgcaggtgtatccgtagtatttctgagatgcaatatatttgctcaagtctatggcaagttttgattacaaactaagatagacattattgtttatcgatttctctgtgctactgcagctagtggagcctctgactggagacacgtgggaatt

SEQ ID NO: 116503 - DNA, 541 bp, Physcomitrella patens
  Intron number 2 from transcript Pp1s96_74V6.1 (locus Pp1s9 6_74V6) derived from phytozome v7.0 (chr-ID scaffold_96; p os 459894 to 460434)
ctttgtgggtcccgtcagcgaagtgctatctttcggtattagtcactctcatattctttaattgcacaaaatctccaccgtctaatactttgagagtatcaagaaaggatggactgcgtactctaaaactgcatttgtcgggaattatctcgtttgttagcattattattatttgtattatcattgttttggtgattttcgggatttctcatgtatgagcagtaatttttgttgatgatacgacgaataagaccaatgggcttcttgataggtgatctagacttaccgatcctgagtttgggactgtataataatgtgtagaaaatgcatttctatgcagaccttgaatattaatttggacaattaatttctttagatgaagatgctttgctttgttgagttttagatattgcataactgatgttagactttgaataactcgaaaagttttggtgatctgttttttacgttctgtttatctatcatttccgtggggaatggtacagttgacctgattctcccgcaagtaagaagcaagcaa

SEQ ID NO: 116504 - DNA, 608 bp, Physcomitrella patens
  Intron number 1 from transcript Pp1s40_51V6.1 (locus Pp1s4 0_51V6) derived from phytozome v7.0 (chr-ID scaffold_40; p os 408329 to 408936 reverse strand)
cggcggtggcgtcgttagagagcctcggcatcagggtaacttttcttctgttctaaggttttggtagtgtttttgtggggccgattgtgtggatgtctgcgtcgagtgcaattgctagttgggtcctaccaatttgcacagatgtagaatttatcgtacaactatgtgtattacctcctccctgaggattggacattttgtaaatggtgttatgtttgtgtgtgaagagaatgacgggtggattttgggggtcttaatggtaagatttctgggttaggattgatttacaagctcagaaacgtcggtaaaagtatgccctcctctgtttagcgctgaccccgaggtgccgcttaataatcgtaagttctttttcgttaggttagatggtgatactgtgaaattagctagcccttgtagcttacaatcaaattatgtatgccttgtgtccttaccaatattttgtttttctagaattattctgtagctgctcttgtacgttttgagatgggaatgttgtacaaggtgtggtcagaatttagacttaactactgccactgactttccactgacttgacgttttgtcgagaaggctgtaggcgtgcagggtg

SEQ ID NO: 116505 - DNA, 406 bp, Physcomitrella patens
  Intron number 1 from transcript Pp1s8_168V6.1 (locus Pp1s8 _168V6) derived from phytozome v7.0 (chr-ID scaffold_8; po s 1529858 to 1530263 reverse strand)
gaggccctccagcagctcgcctcctccacggttcgtcgcgcgcttcgtttcattgtccttcgcgtcatgttttgagccttggtcttgtggtttagttactgtggcgcgttcagaccgagaaagatcatttgggtagctggtttgtttgttttttttgttattttttgtttttcttcccgcgatttctttcgaatggagtttgtatagagttttgagaatttgttctcgatgtggcgtgctagtgattagagacgtttgatgtgtgtgtgagagagtttagatgctgtgatgggttagtagagtttaatgaggattagtgattgatgatcgtcagggggtttgaggtgttcatgtgggttgttgggtggattgcggcagcgcgctcgtggcattgtcgcatctggaa

SEQ ID NO: 116506 - DNA, 556 bp, Physcomitrella patens
  Intron number 2 from transcript Pp1s298_69V6.1 (locus Pp1s 298_69V6) derived from phytozome v7.0 (chr-ID scaffold_298 ; pos 463722 to 464277)
tcaatcttagggccgttagcttattgctctgaaaggtgatttttctttccacaaactctttgcccctgctgttctagcaacgtttatgttggagttttatcattgtccggaaatgattgtcgaagaacttgcaatgagagtgttatgtggaaatttgtggtctgatagttctcttgggctgctgattaccgacagttacgactagatttcccgctgagtcgagctatatgttttgccttggcttactgtcggtagatgacgatttgagtgagtagtttctacaatttgccactgttgtatgcctcttatattatcactggatatgtttcttggtatgcttgctatagaaatcacagtgcgaagcacttgtagacttaactactgaagatatcatctcattatttatctgcgcttctagcctatcaatgatggaaaatgctgattttcatcagtctagaaactggatgtccttgtttatttcacggtatgactaacatttgttttcgtctttgcaaatgaaggagggtacgaccgccaatatctggctactttttat

SEQ ID NO: 116507 - DNA, 388 bp, Physcomitrella patens
  Intron number 2 from transcript Pp1s211_116V6.1 (locus Pp1 s211_116V6) derived from phytozome v7.0 (chr-ID scaffold_2 11; pos 586628 to 587015)
cagcgacttgtgctgttgccggagttttgctactggtgagtaagcggcattagtactttaatcaatatctccctatcgaaagccatgttgaccaagacaaaccatggatcataagccagcaatcgttcacagaacttctgcttattattatgaccctttcctgtttgttttcatgccaaaacctcacgtatcaccacctttttttctttttcttttttctttaagaaatttcatttgcttgcatattaatctttaccaatttgctttcatgttgaaatcttctgtgacggatgaatttcgtgctagtttgatttttattttgagtacgcgataattgtagagaaggataagcttggatttgtaggtccaagggaagaaatatttcact

SEQ ID NO: 116508 - DNA, 800 bp, Physcomitrella patens
  Intron number 1 from transcript Pp1s545_12V6.1 (locus Pp1s 545_12V6) derived from phytozome v7.0 (chr-ID scaffold_545 ; pos 58907 to 59706 reverse strand)
cgccaccaccgctcccacttctgctgccacatctggtaccgtcgtttctcacgttttctctctgttgggtccttactgcatttgttggttgcgacgttaggaaacccagagttagaaactctgtcgcattttcgagttggatttcccttgaattttttaacgctgacttgaatggactttatgggtttcaagtttaatgttgtttaggttttcttgttttgtgtctgctgctagtttcccgaaaatttcgacaattatgtgttactggtattggtttctaaacttggattttctagggttttgactcttgttttcagtaatcacaacactctagcttgttgtagtgaacttgtagatcggttctgtggagttaagtgtattctaggtctttatctctagtaaccaattttgctgctaagtgtatttagtttcatcgtttgcatgtgatgtcttcatagcataacctggtgagactgtatttcactagatagctacgtcggtgatgcacgaatcagtcaccgttgaaatatccaaaatagggcttgagtgttcaggtttctattctgaggcgtcttagcttctcagtgctctgccggtattcgctagtttaattcacactccacgtgcttttctaaaaagtttacaccgctgatttttgtcttcccatgctattatctatcagcctgtgtgatatctgctctgaaacacatggcggtcaacgatatcagcatattgtcgatgctgatatgctttctgtattcgcaggtaccaggcagtttcacgctacgggggcgaagagg

SEQ ID NO: 116509 - DNA, 701 bp, Physcomitrella patens
  Intron number 1 from transcript Pp1s371_2V6.1 (locus Pp1s3 71_2V6) derived from phytozome v7.0 (chr-ID scaffold_371; pos 25545 to 26245 reverse strand)
ctctgagccccttcaaggtgcagtccctcaattcttgaattctgagatggtatgtgagtgggttccgctacgttgaacttcacgactatacacttttgtgtcttgggggtcagtagtagtcctgtccctcgatcgatccgcacgtgacgtagggtcactcggtgatgaaagctgctcgtggtcttgagaagaaaagttcgaggacttcgcgttgttttgctagaaggctagtatctttgagtagaatgcgtgaaggtttttgttggaagttttcttaggattgcattctttcaattcctgccccaattctggtgcttgattgcggttgaatgacgaaggtttgttatgtgttcctccccgttcaagcatgggcattggctcaggttttgtttcttactgctgagcagtgtgatagcgtttctcaagcaagctgtctctttttcttgggctggggttctctgcctttgggtcgctgtggtgccgtaatagtggattgtagtagtacacgcattcagtccaccgtttacggagtgtttttgattgtagttttctcctctgtaagacatagacgtatggtcgcgttctaattttgctcgttatgtgtatttctcgtcgctggattagagtgctttttttgtttggtttctgttttaattattagtcgttctcttctgcaggcttcactcccagagcaatcaaac

SEQ ID NO: 116510 - DNA, 456 bp, Physcomitrella patens
  Intron number 4 from transcript Pp1s10_378V6.1 (locus Pp1s 10_378V6) derived from phytozome v7.0 (chr-ID scaffold_10; pos 2955760 to 2956215 reverse strand)
atctactcaaacgagtgaaggtactttacttccgttacagtgacacatttagtaagcttggatgtgaagttatacgctcttgcatgcttgttatctgcactttgcatgtaaaacttacaaatcatgacccaaagtgccaatgataaggttatatgaaaaaaaacatggtatgctattagtatactttcagcaaagtgttgctttcggtgtctggaaacttagcatgcatcattacataacttccagtcattactgaatccgtagattcactggtgatatggtttaatccaactggatcagtgattgagattctcaatatttgaatttttttgactctacactagtctatgctttagtttgattccactttttcttaagtcttccatgattgctgggtgagctgatgttgctgcgttttcaggcgcagacttcagcattgaaggaaatacctgttgt

SEQ ID NO: 116511 - DNA, 692 bp, Physcomitrella patens
  Intron number 1 from transcript Pp1s88_1V6.1 (locus Pp1s88 _1V6) derived from phytozome v7.0 (chr-ID scaffold_88; pos 21742 to 22433 reverse strand)
tccgatctcctccctggctcgttgcttgtttacaggtatatgcgggtactgtaatagtctgcaattgtgactcgtctttgcactagatctgtgggtgtacgtgtgtgcggagttcatcggattgatgtgggtgtttcagtagaggtggttctcttcatagaggaagttttctgagggtttaggacagcttgagttgcagtcacagggctcgttaggagtaagtgcgaattttcggagagtgatatttttcggagaatcttgatgtggacctgacgaaggggactttgaattcgggtcacactttcctaagaggttttcgttttacgaggcgaatggttgagttttaaggggcgaatggttgagttttaaggacatattacttagatctaacaaacctagcggtgtgcttcgtccgtgccctttgaagggcgttgcttctcaggataaagttgtgagctggtggtattttagaagtggatcgatgtattgagtgcattgggtttactctgacgctgttgcgcggcattttggtttattttggaattgtcttcgggggcggatgcgagtttgcgaggagtttttgcaccagatctatcgttttctagtcacagtgggttattcttacatttattttggtgacgtattcatgcagaacagagttcttttttccacattccggtgagcgttgcgtc

SEQ ID NO: 116512 - DNA, 1040 bp, Physcomitrella patens
  Intron number 1 from transcript Pp1s13_327V6.1 (locus Pp1s 13_327V6) derived from phytozome v7.0 (chr-ID scaffold_13; pos 2135152 to 2136191)
aaattgtagttaagtgagtattttcttacactcctgctctgcgtcttttagtgctgtttgtgcattgacaggttctctgaacgcaaccgagtcattttgatgtacttttctgattcaccggtcgactgcattcttctataattgcgacactcatactagagttacacagactccaacagaaatgtataggacattttattacttcgatcatccaaataatcgtgttcctgttggggctcattccgcaacgattttagtttacgcttattaggtgaagtcactgcgtttaaaaaatcgtggtcgtttccgcctcgaatatctttcagaaggttttgagcatagctagttcactcaaggctgaattctccgcgttcgcaactggactatcgtgctccgtacgcgctcagtttgttcatcaatgtcaagaatgcgaaaagaaagagctagctttttcgcgagtgattgctttttcttcttcaagttctgccccgatattttttggttttccgtttttcgtccgtctattgctttcactcttcggtactccggcagcttgtggacgtggacgtggacgtcgtcacctagctatgattccctttcttattggaagtaaattccttcattaaatcctaatggataagaattattgagtaagactagcaactatcatggcttttaatcttgccacgtttgaggtatttattgcctggaatactttcccatagcgaatgcctgaaagctgaaatggttagatctatgcgagttttgaagcatcttacgactcgatcttatctatattgtcttagggatgtgttgaccattgtcagggcaataactaggagaggtcaccgtttatcaaaagaagtaatgcattgttcttctttgaactaatgttcagttctcgcgactcactttcattgagttgtattcgtggaacattcaaatagcaaactgtagcttcttttaagaaaccggaattcaaatgagttagtgatgcttgcgcagaaaaatagaagaagcaggtctgcatcatatcgact

SEQ ID NO: 116513 - DNA, 725 bp, Physcomitrella patens
  Intron number 1 from transcript Pp1s78_218V6.1 (locus Pp1s 78_218V6) derived from phytozome v7.0 (chr-ID scaffold_78; pos 1462638 to 1463362 reverse strand)
tcccggacgaggacacaattgcatcaattacaaaggtaaattcgcccgaacactcagagttgtttagtacgataacctaaatatgtacctagtcggtgttgtcgtcttcagaaacattatttatggtatggatgttttcgggtatcctgcaagtactcacatggagatttttaattaagttatttattcttgctttcactggtacaattgcatctgacaccaaaacctggaaatcaatctgagagcagatgttttatgtgtttttgagctttatgattccaatgacaattttcagacagaataattcgaaccagccgttgtttgtgaaatctacttgcattcgattatgacatgtgctagaaaaattaggatgatctacgaatccatggtttcttataggtaatttgaggtcacattccggtgaaccctagctctagaactaacaaatgagccaatttcgccttcaacccgcagaagttgagactctcaaagttgcagaataacttgtcttttaagcggcatcacaataaagctttggtgctttcagaaccaaacgccacaagttacgcctccccggacatttctggtggcactgatgctaacagtggtcaattaccctttacaggggttattgtggaaattagcgttcaaaccgacttgtaacttactttcaagggaattttcattcaaaaaatctgtgttttcatgcagaccaacctgtacga

SEQ ID NO: 116514 - DNA, 866 bp, Physcomitrella patens
  Intron number 1 from transcript Pp1s220_12V6.1 (locus Pp1s 220_12V6) derived from phytozome v7.0 (chr-ID scaffold_220 ; pos 26301 to 27166 reverse strand)
ccccgcggggagtaggaagccacctgcaagagttcgctgggagggactggacttttctttttgtctccgatttagttattgctccttatgaccacttagcagagaagatttcgcattaacattcaagattacactctcaacaattttcttgttctttgcaacaggaggggaactacttttcattgacgctgcgcctttcatttccatgcagggtagtttgtccaatcaagcacggtcttaaccaacaaacaaacaaaccatgttttgtcccgtgtctattggttgctcgtttgtgtgtcttggtcctaaaccctaaacctatctcacttgtccaagcacaatactttgtgattaaattttttcagcatccttgggcttggccaatggcgatgaaatctttctcagcctgacagtcttgagatgcctagcaaacctctagaatcaaaagttgacaacattgaaaacaatggactggagaaaatagcttaactttcttctgaagcttggatgacaaagtaaaggcagtggcgcattgattaacagctttgcactgaatttgagtgtgtatgaagctggacagttgtcaacagtaaaggacaatcggtttagggtttagcacaggattaagaggccaaatgagtaaattagaccacaccaaacaagtttaaggctgcagcacttttatggtcaactttcaagagtgcacactctttgggtgggtatgcaaagttcaaccctaattagtgttccatcatgagaatatgcacagctttatctacatactccgattctcatgagctaaaagctagacagagaccccatattctttcctttcacacccacacaaaactggggtggggcagctg

SEQ ID NO: 116515 - DNA, 974 bp, Physcomitrella patens
  Intron number 1 from transcript Pp1s25_163V6.1 (locus Pp1s 25_163V6) derived from phytozome v7.0 (chr-ID scaffold_25; pos 1125611 to 1126584 reverse strand)
ctcttcaaggtatgttgctttccaatccgagttgctgtttacagcttcggcttcaaaacgaagacgttcgggtttgtttggaatcagttgtcagttcggaaggcaacctccgtccgatcacactcgtcattaaacacactaataccccatttgacgagtagaagtattgtgctgagcagatgaacttcaaagctagaaggtacttcgcacaacccagttcgccaaaatgtggtatgggcattctcaactagttcagaaacacttaaaatatcctcaagttgcacacacacacacacacgtgtaaatgtacaagtaaagtttcctctatactcgctgaagataaacaatctcattacagaggcgaattcacaggacaaacacagagagaatgagattctatgagtttgcacatagaaaagactctttacacacatttatgctgaatagtatacagcaaggtgaaataggaaaccatcgctgaccaacgttgattgcttactcgttctgactttctgcttccaacagcttcaaactctagaccgccacagaagtagcagctgcgtgtatcttaccgtctgagtgtttgaacctaaatcaaaactgccaagtatggtttcgcatacacacattcttgtccatcctcacgatgctctaaggacccggtcacatgatctattcaaccaaccacttagttgggtggtgagcggccacatccacaatagagaccattctgacacgacctcaacataaaagctctgaccagtaatttttttgtggaactgtctaaggattctaaagcttttgccaccagctttctcttcgtacttcaagagggtattttgagattcacttggggtcagagatggctgtcatcaaagctgtcaaaatagcatcaccttagcaaatgagtcagattgtcgggtccttcaaggtctctaggtatcaaagtggaagtctcggtcgctgtcgctaat

SEQ ID NO: 116516 - DNA, 553 bp, Physcomitrella patens
  Intron number 1 from transcript Pp1s96_51V6.2 (locus Pp1s9 6_51V6) derived from phytozome v7.0 (chr-ID scaffold_96; p os 324025 to 324577)
tattcgtgtgttctcggtacgtgtttgcaacttacgacgtcaggaattatttccaatcaacacatttctctggcagtcagtccacactgagacactcttggtacgaatgatgcactgaaagaatgtattctgaaatgatgattccagagataagttatatcaaaaaacgcaatgtgaatcctcggtgctgtgacctggggtgttggactgttctaatttagggtagttgcaaatccgcgaggcttggagaggtagggttgcgcgtgggttgcttgcgaaggattgtgaattacgttgattttcttcgaagagcgtctgaaaccttcgacagtagtgaggttgttgtcgtccgggatagattagtctgtacacccttggagtgccttcttttcttcaaaatactactacaactacaatcgaattctctcgaattactctgctacacgttatgcttttgaggactacggagacactaaatacaccttttgagaaatgatttgatttgtttgcgatggcagttcgtggtgttgcaggaacatctttttcgcatttt

SEQ ID NO: 116517 - DNA, 711 bp, Physcomitrella patens
  Intron number 1 from transcript Pp1s52_117V6.1 (locus Pp1s 52_117V6) derived from phytozome v7.0 (chr-ID scaffold_52; pos 1072864 to 1073574 reverse strand)
tgaatagtcctcctgcgaagaaaagccgtggggaggtatgctgttgatttgtggatctgaaagttcgtactaattgggtcggctttaataatttgtaatggattgaagcgtactgaattattgacaatctaaatacaattgttgtcagctggaagtagacatggtaattagctgatacttgcgcttataattatcttataaactatgaaaaaaagagaaaatgaataagaaaggaatgaaaaaagaatcagaagaagaagaagatgagaaatttaatatcttcattgtgtcattgaggagtgagaaattaagcatctgcttgttgcgatatttatcacatacacccaccaaaagttcagagtgaaaatccaatggagggaagagatgttccctcgtttgataagtacatcaatcttcgctcttgattgtcaagtaaagcgcttagctttcattattttatccatcaacagagctttttaatttgctcagaaggtcgagtcactctgttacgtcagtgttttgagtttgtacttctgctttgaagttaccttctctattcgttacgtggtccccaacatatgttgctcgaactaccctattcagttctacatcttcggcagctttatctgcagctctgtcctcgagcttcaatttattgcatgggcatgtgctgtagattgttcagcgcagcactcctgaaggtttgcggac

SEQ ID NO: 116518 - DNA, 936 bp, Physcomitrella patens
  Intron number 1 from transcript Pp1s91_45V6.1 (locus Pp1s9 1_45V6) derived from phytozome v7.0 (chr-ID scaffold_91; p os 271314 to 272249)
cttcgtctcagcaacgcagtccagaatctgagcagttttatatagaaaagttctttcatactaggtttatgccttacatccaactcaagtatcttgtgagctatgcagaagttacgcagtggtcatttgtcagtgttctgtgcaatgtttggaactaggattttgtatgctggtgtcaacatctgcacgtaaggcttgaagagttccctttaatcgtcagtttaatccaaccttaatgtgttcatttcttgaatttccttgtgacatgagcttttttgcacttttttgtggattgaaatccttgcactgctcaaatgccaaaatcgtttgactcctgttgaccgacattacaaagcactggttgttcgtagatatggcgactattatggcaactcacctttggagttaacatgttttgcatctgtaaaatttatgacgggatttacagtagaactgtaagctgtgtttaactttcctttgtaaacgctgcagaaacttgtttattaatacctcatgtgcttcagtgagtttgaggtgaagcaaattataccgaaattaagttgtacggatagcaacttaactgataccacgggtacaagtgagtctagtgagatatcatctgatccaagtgatgtggaagcagatgctactaccgatataggtttggaagtgaacgagacaggataaaagtaatctgagaatgtagatggtgctgtggatgagggtttggaaggaaaaacatgggacaatacgaaaattaaactatattgcaaagctattgtaatagataaaggtttaagtaggacacaagattatccttctggtaatctcgtttaaaagaaagtcgttgggaatgttttcttttgtcaagttgcgaattctttttgcattgccactgtagcttgtgaaagaagggagtgtgctgaacatcgagct

SEQ ID NO: 116519 - DNA, 409 bp, Physcomitrella patens
  Intron number 3 from transcript Pp1s475_18V6.1 (locus Pp1s 475_18V6) derived from phytozome v7.0 (chr-ID scaffold_475 ; pos 106911 to 107319 reverse strand)
tcttccccgtcgattttctaacaatttcagagaaggtgcgtcctacagttctgttctgtgttcagttaagattattcatgcgaaagagatcaccagtgtcttcaacatgacaattatcagcagtgtgttgcggggtagacttcaagattcagggggggggggttgagtcttttgaagtacttcgcacagcatgccaattagtattttgggtgcgttgttttgctcatcaccaatgtaaattcaaaaccttttgtggtcgaagtatgtattactgttttttgtatcatttcgttggcgtcggagagaaccatcaggagttgctataattatctatcgattgcaaacaatctaagaggcgaccttgaaccttgcaggaacccaagcagctcccaagaagacggttgccacg

SEQ ID NO: 116520 - DNA, 870 bp, Physcomitrella patens
  Intron number 1 from transcript Pp1s83_234V6.4 (locus Pp1s 83_234V6) derived from phytozome v7.0 (chr-ID scaffold_83; pos 1511590 to 1512459)
tgttactactcttaggtctgcgtctgatctctctctctctctctctctctctctgtccctcactcgcacttgcactcgcactcgcactcgcactcacttcattgcattccattccattccatctcatttcatctcgctctctcgctctcggtttttggctcgctatttgccggtctgtttgcctgtctgcctatctctcttggttgcttgtgtgcttgtgagcgagctcgctggctatggcggattcccagctttgagttatcaaacgtacgttctgcgttgttcttgcctttgcattggtgggtttcttgtgtgtttgaggttatggtgttgttgttctgctgtggagtttggcggggtggggtgtggtggtagctggactgagttgtcgttattgacgtggtggtggtggtggtggagggagtgagattgtgtcggattctggactgaggagaggttttgtccgagtggtgatgtgtgcgggtgctgtggaggagtgcacttgggcgattttgtgttgagtcgtagagttgtggtgaaattcgaattgcgtgattgggttggagtgttgcttgggtttgatagatctctgttgatgcggctcgctggagtttgttgcgcgcagattgagcttgctgtattgtcttctcgattcaattctttagtcacacggttgtatgcaggtatgtgcgtttagatctctgttgtcagtgggcgctagtgttgttggatgtgcgagtgagttttctctgctgctccttgctccctttcttccgggcatcaatttggagtcatctcactttcgaatattccctaattattttgtgaattgcagatcgtgcagccgacatctattggctaggagaaagc

SEQ ID NO: 116521 - DNA, 552 bp, Physcomitrella patens
  Intron number 2 from transcript Pp1s68_4V6.1 (locus Pp1s68 _4V6) derived from phytozome v7.0 (chr-ID scaffold_68; pos 21657 to 22208 reverse strand)
tactgtcacggcgtttgacgctaaccattgtcctggtaggtcccattgtcttgccttacctcacgctcctcggacccttagtaagttatcatttgattttaattcattgtacaatatgttgaatgccttccaagaatggactgtagaaatgtttttagatcaagcggccatcgtccgttaagatgtgtaagatgccaggcagaggtggaaatttattgttgcgaccacaacatattgtaatgatcgtattttagaagtagatacgtccttgcaccttgaacaatgaacatggaccttagttgtccatcttaaataaaatcgattggtttttgtaatgatcaatctcttgcactagttgcagaatccgcgttcattgatagttgtggcaaagtctatacagaagaaccgagaaaatttggctggcatctttttattcaacttaggacttcaccaagttgtgctttgtgtagtgagagaatgcataaaattaaacgaacaaactaggtcctgaattgtctgcattgtgttgcagcaagcagcggtcaacattcc

SEQ ID NO: 116522 - DNA, 229 bp, Physcomitrella patens
  Intron number 1 from transcript Pp1s23_135V6.1 (locus Pp1s 23_135V6) derived from phytozome v7.0 (chr-ID scaffold_23; pos 987762 to 987990 reverse strand)
cgatcctaagaaattccacgctcaactttcttgaggtttgttcctgatccgccgccgtttgtcaacttttgcagcaattttgttttctgtcttcttggttgccgtgagcaccgcacagtttcttgcagaacgatcacatgtaattatgatggtggagctcatatcaatgtcttattccttcttgaggattccaggctgcgcttgacgctacagggcttacgaaaaccag

SEQ ID NO: 116523 - DNA, 529 bp, Physcomitrella patens
  Intron number 2 from transcript Pp1s426_18V6.1 (locus Pp1s 426_18V6) derived from phytozome v7.0 (chr-ID scaffold_426 ; pos 103766 to 104294 reverse strand)
aagcttggactgcccggctcctaccatctcgtcaggtttgtgtttgtcaagcaattttgatcattgaatgcgcaattttacaaagattttaggtcaccttcaaattacagtttcacatgctgaaatattctgctgcgtacttagttttccacttttgcagacaaatgtacgtaggggttagatctcgtttttggatgcatttcatggcactcttagtttaatgtttttcatatattcttccatattctgatactcaagtgtagactagtttttgtcggctgatttttgcgcgtctagtttctctcattcttgcggtttggtttatcctaaatcttggatcacaatgagattgttgtctacaatgtccacacgaacctgtcgaagtttcatattttctgtatttggcattcacattattgtcttggcaacaagtcaatgaacccacgaattggaagagcatatcttctcatggacttgtgatttttttggggcagttcggttacattgtattgacgacctcagctggtat

SEQ ID NO: 116524 - DNA, 382 bp, Physcomitrella patens
  Intron number 2 from transcript Pp1s295_46V6.1 (locus Pp1s 295_46V6) derived from phytozome v7.0 (chr-ID scaffold_295 ; pos 331162 to 331543 reverse strand)
cagtccagcaacactgaggtagcctgatcctatcatatcttttgaaagttattgtttctacaagatcaggaattctgtactttactctaataactcatcatgtgatcttatcctactattgctgtcctgtcctagacacgttaatcatactcaaaagtccctcaagtatctgtacgagcaatgttgtgtaatgcagtaagccatgctatagcataccagacccatcggagagtagaagggattttctctctgacctcttccactgtagtgtttggaatatgcttgcctttgtgtagtgagatatgtctagattgtcaatggctgtgctattttgtaagccatagaaatcatctgggtttgattgcaggtgggagccggaacc

SEQ ID NO: 116525 - DNA, 708 bp, Physcomitrella patens
  Intron number 1 from transcript Pp1s377_41V6.1 (locus Pp1s 377_41V6) derived from phytozome v7.0 (chr-ID scaffold_377 ; pos 293168 to 293875)
ctgtgctgctcgatctgcgtgtgtccgattggcaggtgctacatcacatccctgcccttcatctctgctaacccatcgtgttctattccttcgtttctcgttcagtccagtttcagcattcttcgttcggtccttgcatctcgcatgaccgattcattgtcttcgattcattaacgtgttgtcgaattgtcacgcaaaatggcaatgcgagctggctcatattcgtgttaatttcagtgagttttggggatcttcgggagttgtctgttctgggtctcttaagccggagtgtatccgtgtttgaagtatgtagggtaaatttattggcctccacggatttttaagggtcttgttgcgtttggtataatttgtaagttgtaggtgaatttgattgtgctgagagggactcttgtgacttttgttctcttacgcgttgttggccttgcaatggtctcgatctcccttcgtttttttgtcatgcaaaacggtttatgtcttcgtggcattgattggttgcagtgtcttcaaatttttctttatctctctggccactcttggttgtggtgattttttttttctttttctttttttttccctcaaatccatggggctctgagtttagcattctgaggtcttatctgatatggcgcttgtttggcatgtctggtggggcgagcttagtacggccgcaagtggtaatcaacgaat

SEQ ID NO: 116526 - DNA, 960 bp, Physcomitrella patens
  Intron number 2 from transcript Pp1s377_41V6.1 (locus Pp1s 377_41V6) derived from phytozome v7.0 (chr-ID scaffold_377 ; pos 293926 to 294885)
ctcgccccagctgacacagactcgtaattttgcaggtaaattgtgaatccacacctcactactttctacgaggatcaaattatgtgcaggccattgtcagcccgtgggaaatagactctcaaggtttcaaaaccatctatggtttcggcacagtttttaattattctggctatcagtcgctaattaattctgaaagacaggaaatgaataatttgtcacagacgttttctttctgcaaggatgaaatcgccgaaaattctttggcatagaatttaataaaatgaatccgccactatcgacagggcacaaagcctacggatcgatgattacggccaatgtaggattattgatttcattccaatgatgtcgtacgcaaaatggcgattcctgctgatcgcttaaaactgaaaaattgagtgttgaatggcaatatgatcggttcctgttagtacctgttgactgacaccaacgaatttaagaaacaggcttgattgcttaccctgcaattgagcatgtacgttttagttgaatgcaccttggatgggacattgaaacgattgggagattacttcggcgcgtcaaaatcaaatggtgacttagagctgctctttttgacaaagatatgaacaataagcttctcctttttttatatttatttaaatttttgatttttttttgcaagcttcaaagcgccagtcaatcattcgtctatgacctaccatcgtagcgcctgagtggcgtagtcgtggcagaaactgagtcaggttgcttgaacattttctcgcactgaaacttgttttgcgaattaattcttttcacgaagaggccgttacaaaacaccgtaagctgaaagtacagaaaatttattgatggttagttagaaaattttcatccgtgttttaccctttgtatgcctggcataacacgctgcaattcttgtcattgacccagctgacgctc

SEQ ID NO: 116527 - DNA, 927 bp, Physcomitrella patens
  Intron number 1 from transcript Pp1s43_46V6.1 (locus Pp1s4 3_46V6) derived from phytozome v7.0 (chr-ID scaffold_43; p os 322002 to 322928 reverse strand)
gtgaaggagaacttcgcgtggaggcactattactggtgagttgctctgtgccatcgatgtagataccgtttggttgtgttttttgtgagagcttttttagggtacctattctacctgtatcagggtttggagtttggacctcctggttggcactgataaaatgtagttacttcagctaaatactaagtaatgaaaattgtctatttcaaaaccgtattctatattgttcaggagtgtacatctgcattccaacaccgaattgctacgaggttgatgaacttgttggtcctttgcattttggatcgtcaaactggcatcaatatcgcgacacttgcgtggtttaggtgtttcggagcctcttgaaactgatactgcattcattttgcagtgcgagtgaaactatcaaaataatttttaacggtagaatgttttcttcgagtgattttcatcggaaaacattaattttgcttacattctctggataacgtcacttgcatcatctccttaactccattttaccctgaccacaacttttctcagaatctccctgtcgttgtagtatgtgggaattattcttatcaggcgcattattcatctgtacgacatcagtgcatttgcagtcaagtttgccacttatattttctgattgtgtcctaggagtctgcgttgtaagcgattagggtcgttaaatttttgtttgcatagatcaggaaatcgtttcaatatcgtggaattgagtttgaaaatcctaccccttgagcgatgtctttgttagcagttgcatcgtcaaccactagatatttttcgtgttccaccgaagtggctcataccctttttttctgctgataattcaaattacataagaatgttgaagtaagcggtttactgacttcatcacatgtcgcttacattacaggtatttgacca

SEQ ID NO: 116528 - DNA, 1008 bp, Physcomitrella patens
  Intron number 1 from transcript Pp1s43_96V6.1 (locus Pp1s4 3_96V6) derived from phytozome v7.0 (chr-ID scaffold_43; p os 822707 to 823714)
aaccgactacatcgttgaggtcctaagaatatcaggtaagtggagtttcttgaacccattattttggtcttcatctgatatcatatgcaaccagccaaactacgatgatattggatattctgtaatctgttttgatctatggccccaactgtgaacgagactccatgtatcacacgccaactatgacataaatggactcttgacaggaatgacatagaaaaagggttgaaatttttttgatttcctcacaagggaatatacaatttgaccattgtaatagcctaatgttcattcacaggcactaacaccactgactctcgaattgtaagcaatttagatattgttgctacaagtgcgattcaagcgctagagatacttttactagccttccaatcgttctcccatcacttcagtctcggacttgaaccacttttgcgtgtatttgaacactctttagcttcagcttttggaactttatagaaagacactttgaacgtaatatgttatggaaaagctcatcaccctaatgtagtgggtgcctctcgcgctgaacatcttgtagagctcctgatcaaccttttcaactatatagaagcgtgatgaaagatcacgcaatatctgatatttttggttttggtctcttgccaaggattttgaatgctacttgcaatacccttggaactttgttgagagaaccctcatgctctagcaccccttcaatttgcttaacgctacaagaatgcatctgcgctctgactgattgcattagtgcggaccctatatatgcaacaaaacacaaaggattcatgtttactgctcatctgctccaagatgcttatatcttcttgaccattccttctgagcagtttaccgcatagacagactttttgatgactcatttctactttcacatgctctcaatttttactactaactacaataatatctcagacgaaataactacaaatgctttcttcgatttagtcagaaacattttataatttggag

SEQ ID NO: 116529 - DNA, 813 bp, Physcomitrella patens
  Intron number 1 from transcript Pp1s152_87V6.3 (locus Pp1s 152_87V6) derived from phytozome v7.0 (chr-ID scaffold_152 ; pos 477592 to 478404)
gcctgtactattaccccctctttttacctttttcttgttttccggcagtatagtttgttcatgatctgttaattccactcgtcgtttccgtttttctcactaaattggtgtataggaatgtgcaatcagttgagattcgaggacgttgtacgaggatttgagcagttttgtggtgtggtatcgtgtgttttggtgtgcttgactcagcgtggtagattttcagaggacatttatgctagtgtattgttttgttgtggtatttgaatggccatttgaaggtgtggttagctattgtagtgaatggctcctttcattgcctttcgaagaagattttagcatttcggtatcttggtgtcggaggctaaaaacacgcgtgagagtttatcaagtgacttcatattgctgtctcagttttttcaatggtctgtatgggtttatttggatgagttgaccagcggtcttggtgaatcaacagtagtaagtgtttgtcggtggtattcaaggaagaaaagcaggaactatttgttcgaagttatgcggcagggttttcgttttattttgttttaaactcttgtgtagggtttgagattttagaattaaattcaacagttgatttttggatttcggcctgtttttttatcaccatgtttgaattgacgtggaatggatttcatcatttcttcagttagtctggaactggctctggaaccgaggtttttgtttgcaggaggttttcatcagcttcagtatttgagtcccagcctcatgttatgtgcagcttctgtgtggcagttgtgtaagccgccttcacac

SEQ ID NO: 116530 - DNA, 1043 bp, Physcomitrella patens
  Intron number 1 from transcript Pp1s385_12V6.1 (locus Pp1s 385_12V6) derived from phytozome v7.0 (chr-ID scaffold_385 ; pos 132823 to 133865 reverse strand)
cgcttgccacgttgtgttcttcggaaattcaagtggtaattactctctgattctcgcatccttcgagctacgttcgccgcctaattcccatatctaccgcccttaatctaataattgatcaccgtgcagagaatgaggacagtggatggaacaaatagttatgggagagactaattgaattcaggaatatatcatggaaagttacatccaaacaaatggagaagcaaccagaccacaagacaatattcctcaaaagatgggatcgaacttgaatggcaagaagaatgataggcagtagaactgacttggcaatcaactgaaactcccgaatacctcaatgtggtttgataatccatgataacctagaagattattaggatagtgggtgctagccttgatacgcacctacaaatgctgttagggtataaggtcctctaatctgtaatttttcttaatccatcttagcctgttttgtgtcaaaaagaaaaagaaaaagaaacacacagttatcacagaagtcgaaccagcacgtttacaagacaaaggtggttattcagggtggccaatcaatcaaatagatcacattctgtcacatccttattcatgtaatcaagcaagagctttcgaagagattttcagcaactgcagttgatggttgaggaagcccttgttaattgcgtggcgacatgtgaactgcgtctagtgcagctcaaaccaattgggattggcaaagaatatccaattttgttctgtgatgagctggaatctgagttcgttgaaatcgtgaatcgcatgagttcggaaatatggcgcgcaatcacagtttgtctcggcactttttaaaccgtattcaacgaagccaaatttcctgcgacttatttcggaactccattggcatggattgatgacataccaccatgcatttggtatgacaactccggcaatttcggggagaactcgccacaattgacaacggattctagcatttgccttaaggcgaattgagctgttgctgaaattatgtggcttcagtttactttggg

SEQ ID NO: 116531 - DNA, 779 bp, Physcomitrella patens
  Intron number 1 from transcript Pp1s434_14V6.1 (locus Pp1s 434_14V6) derived from phytozome v7.0 (chr-ID scaffold_434 ; pos 111298 to 112076 reverse strand)
tcccagcctctagtccctcctcgcagggctttctggtacttcattcactccttctccttgtctttttagtgcattagttgtctctttttaaacatattcattgtctctttcttgtaaataatgtctgcgagcagcacgtagatctgtcggcttcgctggtgagagcagcagtcttttagggcttcgtgacgcgcagctttgttataatggcgaattttgatactgttgcgagttcgcatttgacacaccttttttttttttttttttcgatttccattagagttctcctggagtaagaatagataattgtatttgtggagttgctcagataagcagcctatgtttgtttagatttctcttagagccaccgtcagcttgacttgcaatgtggcttaaaaacacgcatatcttttaacgggaaagaggcgggttgtatcttttgaatcgtgaatacttccctaagaatatagcactcgcaattatagggtattcacgattacataggagctatggtgcacattgctgattctcctcttccattcacactgcctatggcattgtagaatatatgttgagttgtgaactgattagcacagatctgtgcatagcttgacgtgaattattgttcaaaaaaccaagagaaatatttagatggctaaaacttcattcaatggacaagaaatattcctggaacgcatttagagcggaagaccaaacattaggagttggttaacgtgagatgaacctcgtccctgcaggaatcaggttttctgtgaaca

SEQ ID NO: 116532 - DNA, 789 bp, Physcomitrella patens
  Intron number 2 from transcript Pp1s152_5V6.1 (locus Pp1s1 52_5V6) derived from phytozome v7.0 (chr-ID scaffold_152; pos 20353 to 21141 reverse strand)
gcagctgagcacaacggccggagctttctttcagggtatgtctcctgatcggtagtgtgcgctcttttggcaattctcttcccttgtacgtagtcgcaggcaggaaaaggaccaccctggaattttgaaatgtaaatctaattgcagccatcatcgatcccggcaatgttatttattatttttttttctctctctttgcatcttggaaaacgtttttacatctcggtgaatcaaatctgaaccaaattcgttttgtgaaatttcaatcatggttattctgataagggaggttccaagtgcttcagcattacttgaattcgttcatttgagagggttcatgtgggagtatttgaaggcgctctttcaccttggcaagaagtttcgtgaatagggtgtcgactggaaaggaattcggttgttcttcgatgtaaattttttcttactagaacgtgatgttgccacctaaattcgattagaattcttctatattcttgattgttgtttaattcatttgccttttcagacacaattctatcgattttcgatcaatcacatagccctgcccttccaagtccctgaatgataacgagattttgtgtaagaaacgagttccttttagtttggagtccgacagattctgcacgctcaggatatcatgcttagttgaattttatgcttattttcgttccaatgtgagaattcagacatttagtgggttcaattaagtacataataccgacgcttgtgctcatgaagaaaggttggggatggtggggatgcatgcatcag

SEQ ID NO: 116533 - DNA, 456 bp, Physcomitrella patens
  Intron number 1 from transcript Pp1s13_34V6.1 (locus Pp1s1 3_34V6) derived from phytozome v7.0 (chr-ID scaffold_13; p os 177006 to 177461 reverse strand)
ggtttctgttgtcattctttgtttgttttttttcgtttttcgttttttgttttgttttgttttgttttgaatttttcttttctctgtgtattggcgttttttaccttgtcttttggttgtagcttggttaatgagttgaatatctgttttttgcgttttttagtatgttttttggtgtctgtttattgagaagtttttatatcttgttttgccttgtttgagttttattattttcttttttgcattgcttgagctctcttgttttttctttgaagatactgttcttagttttggttgctagcagttatggactgtgtagggatattgtagtcagatttatccaagggctttagtattgtttcgaattccttttgttgagcactttatcaccatgtttttattggagtttgagaagttggtcgttgttttagtcaggtactagcggccaagctgctc

SEQ ID NO: 116534 - DNA, 867 bp, Physcomitrella patens
  Intron number 1 from transcript Pp1s192_46V6.1 (locus Pp1s 192_46V6) derived from phytozome v7.0 (chr-ID scaffold_192 ; pos 443598 to 444464)
caggttagtatcatcctgtttgcctaccatctagttctcctgctctttacgttgttaatgtcgtagcgtaaatgcgatcgcttttgtctattctggtctagctacttcgtagctatttcctcttaaggtcatcatcccctggtgaaatcaatgtgtcggagaagaacaacacctccgacggacctcgtgccttctcagttcgatttgtcgacgtagttgctatcttttttggttattcccttgagtgctgatgcgtatggagctttcgtatttgcgttctcttgtctttagtgcagaaagttagtgtcgaatcaagtcgatttactgtttcggatacttaaaccagtttttgcacactgatccagccgtcagatactcctctgttaaagttgaagtacatctttgcttctttcttgcactcttacattcatttcgctttaaagacaattcttttgtgagaggaaatggcatagtatgactctcacaaacaacttcacatgcataggtctgtgatttttcagttggattgataatcatggagctccttgtgattttatcagtcattgggacggtttctcaggaagggggagaagagcgaaagagtgaaatggaaccatgttctattgtttagtcttcagtgcacaaggatgttctatattcggagactggggaaggatttggagtatgagatacaaaaggaacagtaaacggggctgtatacgcggagtggacatcctgaattgatatgagcgaggactatgctttgattgcactaggattttatgaattcctagctgtgattgaccaagaaagaaatctctattttttgtttctagacctgctgcctgactctttaaagtaggcatc

SEQ ID NO: 116535 - DNA, 780 bp, Physcomitrella patens; identical to SEQ ID NO: 116296
  Intron number 1 from transcript Pp1s19_262V6.1 (locus Pp1s 19_262V6) derived from phytozome v7.0 (chr-ID scaffold_19; pos 1861424 to 1862203 reverse strand)

SEQ ID NO: 116536 - DNA, 640 bp, Physcomitrella patens
  Intron number 1 from transcript Pp1s29_184V6.2 (locus Pp1s 29_184V6) derived from phytozome v7.0 (chr-ID scaffold_29; pos 1239623 to 1240262)
tgtggtttcctcatcttcttccatctgcgaaggtgcgttgcattttggttcgtgttttgttcgaattggtcatttgttagaattttttcactcaccagagttgtgtagtcgaattcttcgttgttgccttggttttgtgttcttttccattcggtgtttctgacactatgtgtctcttgccgttgtatgctttagagcagaagtcgtcgtcacgagctactcacaattgtgtattatcacattcaagcttgcaacactgcaagctaaagatgcttgtgtctagcatactgttttttagatattttttgttatttgaccctgtgggtagggttctagacgcaccacattactgttttagtaactgctgcacaagtactttgactctgaagccaatacaatcaatgatgcattaaattggaagtgtttaatgtaacgtcctttacgcaccctgcttatcttaattgtgattatgaagagaaacgcaaagtgatttagtgcactttctgctctttgaataatttctttaggtcttcttgtcgattactttctatgccggattcgcactcgttgatggaattccatcatttgtggattgcaatgctcttgacattttactctggcgacagtatcggcatcttct

SEQ ID NO: 116537 - DNA, 1024 bp, Physcomitrella patens
  Intron number 1 from transcript Pp1s1_504V6.1 (locus Pp1s1 _504V6) derived from phytozome v7.0 (chr-ID scaffold_1; po s 2941726 to 2942749 reverse strand)
agattgttgccagtttcagcgtcggattggataaggtgagcactacgattcactattttgaagttcctagtgtacgagatgttgcgaagtggataaaacagacactgaataccttttatgtcgactcgatcctgatgtgttccgatacacagtgcacgcgtttagggagtttgttttctttcctttattttttgccttgatctgttacaagttgttttagtgatgatcttttgcctagccaaattctctacctcgtttcactggtctggcggaactcaattcgaagttcaacaggcctgttttaatttcgtacgtgctgcaaaactttgtatgctgatggcgtgaaccaagtctctgtggtctatcatgttcagttctgccactagcgagtgcaatagctagtggataaaacatcgatgccacagattcactgaacccgtatattgcttctaaactaataatcaaatgtccataatagtgtaccagtatatttaagactttgtgttacattgatacgcttgggctgactgtcctatttagcaattcgaggtggatattttaggaagctttactaccaagtttgtaagccacttatttccatgaaacacagttgtgcttgatgcgcatttgccgtcgtcaagtgtgggcttcatacgtctgagtaagagtatgctgtttgtgattgtgtttcataaagggctagctctggatggctgtacactgtgagtgatatgtttctatggtcctttccaatacagtactcttttgcctaggatatagtcgacgacttaaaatctgaggtgtaggaccgacttctgtaacacgaagtattagatccgcacatgcacggtgcgctcagatttgacgtagacaagcatttcggttcaggttgtcttgttcattcttaagcagttgattagtctccattgtggtgagtatccaagattcttttaggaagaagtcttatgttacttcccttgaaattgcaggttgacttagattattgcaaacaaaaagggattgt

SEQ ID NO: 116538 - DNA, 601 bp, Physcomitrella patens
  Intron number 2 from transcript Pp1s31_83V6.1 (locus Pp1s3 1_83V6) derived from phytozome v7.0 (chr-ID scaffold_31; p os 439090 to 439690 reverse strand)
gtttttgcaattggctgtggcctttataagtacaggtatttctgtcatgttttgcttcacgtgtatgacatctgattctgaaatggtcttctgtattctgctatggtatttgactggcctgcaaactatagatgtatgctgtaaacgactggtaactgaatgtccttaaacttaaagtaggtctcataaatcaaagctgccaaactagtgttctggacgaagtgtgaaaatgtccgtctataggcatatcagccgcataatttgatgatggaatctatgttgctgaggatggtttccttactgttacttcggtaatcataaaagtagaaaccatttcgcttgcttggagtcttgtgcgtcgcacattcttagtgtgttctgttgattgacattctgtctctgtcctcttctgttcctgttgcatgctgatatatttgttatagcctattttcacatcacttttgatctcttagagtttgttcgctttttaatggttctggctcatcattacaatagaattgctggatggagaaacatattttaatgtggtttgacttcattttcagagacttctgttcggtgccactgcttcctgctcaag

SEQ ID NO: 116539 - DNA, 669 bp, Physcomitrella patens
  Intron number 1 from transcript Pp1s479_10V6.2 (locus Pp1s 479_10V6) derived from phytozome v7.0 (chr-ID scaffold_479 ; pos 60867 to 61535 reverse strand)
tggtcaagtgtttgttgtggagacgaagggcttaggtaatgcgaaatttttcagtttgccttttacgtttttgctattattgttagtgttgttgttactgttgagtttatgcagttttagagagaggaaagatagggaatgttatgttgaggtttgtctgcaacctggaatggtggtggggttactgttttgcacaattctgccaccgtcgtgcaggggcttctttgttttgagtagatgagccagcggttgctatcttcttgggagtgagttagattaatgcccttttcctgtggaccgcgctacaaattgtttgggcaacttcttgtgtgcttctgtgttgcattgataatgctcttccgtgttggagtgttccctttgttcttctttgattgttttgatgttgagctgctaccagcactttctctgggtgtgctgtagctccgaagtcatgtggtggcgtgtggcgaatttatgttgattttgaagtggccactctcgttctatttctaatttgggggaggggaagggggagggggtttgaccctgttaagatcactgtttactagtatacatagtatttcacataatcaggtgttgagtagacttttaaagagtatatgttgttactgcatggcatttaatcatcttgaatggaatgccgagcag

SEQ ID NO: 116540 - DNA, 1011 bp, Physcomitrella patens
  Intron number 1 from transcript Pp1s54_48V6.2 (locus Pp1s5 4_48V6) derived from phytozome v7.0 (chr-ID scaffold_54; p os 384233 to 385243 reverse strand)
gggagcgttcgctgctgcaaggccactctcatctcgtaggtacttcatctttctctattgcgctgccctagaaatggagccacgtcgtttgaatcatgaagaaggcttatcgttgttcacctctgatagggttttggcagaagcgcggatactttcggacgatttcctcgagttgagcaattaggagttggtttgtacatttctgtctctgagtagtgtaccacacattgttggagctcgattttaagtaacgtggttcctcctgtaggtactgcaggatgtcactctgcattctaagctaccttgatttcgcagtgttatttttgaagagcgagattcgtcgttttattaattatgagattattataatcaacaggttcgcagatcgcgtggcttttgaaaattaccggcgtgctacgaagaaagagttttttttttttttttttttttttttttttttaggagtattgtcgcccatggattcaattgaaacctaaaccattgcgaagtagaaattagatggcctcgctagattcgtgcgtgaatgaggcatgtcaagaggatgaaatcttcaggttatcgcttcttgagtaagatatgctgccaagcgcttttgaatttaattgcttcttttcagaggagactagtaacgagcacctttggacatacattacatagtggtaagaaaattagtctaagttactcgagctgttttgaaagggtgaccgattgtgttgaaccgtttgtggacattgctgaactgttcaatatttctatggcatctgagcaggtgtgaatgtgagccatcaatgagtaacgtctaaaccagccattgctgattgatcgcaagctcttgtgcttggaggtggatttagtgtttggtgttgagatttgggcgtgtcatagatcatttcgggccttaataatattgctacctgtttgatctgactgccatttgtgcctctatttcctgaaggcagcctttggaagaagttctttatcaaaggcctc

SEQ ID NO: 116541 - DNA, 583 bp, Physcomitrella patens
  Intron number 1 from transcript Pp1s83_10V6.2 (locus Pp1s8 3_10V6) derived from phytozome v7.0 (chr-ID scaffold_83; p os 106749 to 107331 reverse strand)
tgatcttcgctggtgcccccagtctacacttccacgtaagagacgcttggaatggttggccaatgattagagttcggtggatttgaaatattggtaatgagggatagactggttgtgcggtgatctagagcagtgtccctgtgtgacagccttcaatattccaatgattgcatgacgattgggtgacacttgagattacgcaggagaggtagaaaccccggggaggtagattcaacatattcaaaaggaaaaaaaaaaaaaagaaaaaaagaaaaaaaaagaaagttgtttcgtggagcggaatatactgagaaaaacgaatatgaacacattaggttcacagtaaatgcacctcagaccaagccacgaaattatattcggaagaaatttaaaaaataaaaacaaaaataaaaactgaagggaacccgcagaaaccaaaagcgatcgcatgattgcagaaaagagtttgaactcgttgcgcacgtagaaaccctgcaactatagcgatggacattacgaagaatgcaactttcttggactaattgcagcgatttagtggggctggaatatcgaatatttggga

SEQ ID NO: 116542 - DNA, 804 bp, Physcomitrella patens
  Intron number 1 from transcript Pp1s344_1V6.1 (locus Pp1s3 44_1V6) derived from phytozome v7.0 (chr-ID scaffold_344; pos 15676 to 16479 reverse strand)
cctgtccctctttcgcagcgagcttctggcttttctgctgcttccttttatcgttccaagcaatcgctggaagcttttgagagaggcgtttgaatccggtgcgttgacgcctggccggtgagtttggttggagcccggtggaggtgttccgagagatgaatagattggagcgccttccggattaatatctccccggcaagggaagaataagtgtaaatgtaattggaagaatttgacgtgaggaagtgtgggggtttacgctcgggtccgacagtttggtttttgtttgagttgcaatgtgagtgaggtgtggacattatcaaaggttttcatatgaatttctggttcccgttgtctttttctgaaatccaggctcgtgtaggctcagagagaaggtgcttcaatgtgtttgtttttactcaattattctgtcgctctgaaggctcctgcttcggctagtgatcgttttttttaattctctaattttctaatttttttgcttgcgtagagctgaattttgtgaaatgcggaattcggcatggatgtttattgaccttttggtatttgatctcaatagactttgtctaggtgtaacagagtcaaagtgactatttacatgtagctcatgtaatcgagtgcacctatgtggtgattctactgttgttttccaaggtagaaaatagatggttggagatgaagctagtttggtactctgccgttgtgaagtgggattctggggctgtttagttgaagttatgtcaagtaatgacttttttgtctgatgcagagaaaatagacttcgcg

SEQ ID NO: 116543 - DNA, 775 bp, Physcomitrella patens
  Intron number 1 from transcript Pp1s105_137V6.1 (locus Pp1 s105_137V6) derived from phytozome v7.0 (chr-ID scaffold_1 05; pos 897104 to 897878)
aaggttagaaatcaacttgtttttttgttgttcctaccaacttatccttgcctacatttcactcgggaccttacagaatcactggagcttaccaccactcgttctctttgtttttgtcaattgacagttattgctcgaactcatattcaattgttctgaaatttttatattaatttcatgttcacctaactcctttatgcatctcttctttcaatgcaagtgctaaaacattctcctctgaagaaggtccgatctattctgttggtttgctgcaatcttgaatgaagttttcttctccagaattttttaacaagcagatttaaaacaagtaactgagtgtgactgctttgtcaatgttcggggtttttagcattgagcacagaatagcttgttcatacagaatgagctacctgttagttgaatgggaaaactgaattgtgcctgataactgtgtcacccacttctctctgaatttcgcaaactagaagaggtaagaagagatcatgaaaggttcatatgtttttgcttgtgaaggcgttttagggtgtaataatggccattttgtgtttagagataagcatgctgggggcagctaccgaagcgatctacatacaccgactttctatggacatcaatgatatgttcatttgttttgcttttctgaaggaaaaaagacttgttctgtttggacaactttttgtgaaaccttaaagtaacggggtctgtatgtctgttttcaggtcataaagctacaaggttgggagggacaatttct

SEQ ID NO: 116544 - DNA, 859 bp, Physcomitrella patens
  Intron number 1 from transcript Pp1s255_28V6.1 (locus Pp1s 255_28V6) derived from phytozome v7.0 (chr-ID scaffold_255 ; pos 400267 to 401125)
gaggcactactactggtgagttctcagctatctttgtcgatacggtgtgcatggcaggggtggatttgattgtggctgccgtagctgtgttaatacttgggtttttagtgtgtttcagagcaatgttttagggaatctgtatacttagggtttgggtttaaaccttcccagtgaaggagttgacggcctaagagagtagtgccactgaagctgccatttttccccttgtattcttcgtgaggcttggttcagcatccagcagggtttccgttgacacgtttatgtttttcttcattccagttgggacgaatcagtctgttcaaagaatacttcgtgccagtccgtgttcatcctctctcatgtagtcatcggtcatgtattaggctactgctcgattagaatgagattttggggtgactatccgtgagcttatccgacttcgtgaaagtgtaggattgatggtttcacaactaactggtcgagtttgcgttaggcttactggtgattgagtgttatttttcgtgccactgtttacaatatttttccgtattcatgtagaatttaacaggaatgcctagtgtgaaggagaatcgaagatcttagtctggaatgtactttgtcgaatattctgtggcctaattaatttagcggtcagataacgtcaatatcgttatgtaacgtttatgttatttgaatcctacattactgatatatttagaaacgttcggattcctttttcattcttcgagccccgagagtggtttctgtttcctagtattttcctgttttagtttatcttctccgtaatgaatctagctcacataggccattgagacatggcgttgcaggtatttgacca

SEQ ID NO: 116545 - DNA, 731 bp, Physcomitrella patens
  Intron number 1 from transcript Pp1s179_72V6.1 (locus Pp1s 179_72V6) derived from phytozome v7.0 (chr-ID scaffold_179 ; pos 941055 to 941785 reverse strand)
cagtctcacttccgcgttttgcgattcatcgggaggtaccaacccccaactcctgttgcatcttcaactgccttgctctttgaggaatcactcacaacgattttcacttgcagcttcaaattacagcacgttgctattcttactgcaattcccgcaacaatggcatggtgtaagtgcaatatcatagctaatcctaagaatcagttcgttttgactgcagcatgaaacccgaggatcaaaactaattgtgcaccctgacaatgtgcgcagcaaattcaaatctgcattggtgattccggcagaatcgatgattgctgaatcgtgacaaagcagagtggagacaatctcgacggtctcgtgcatgtgtctcagtgcatgtctcgttccaagttgcgagtttgttgggttttagggtttttggttgtttgggataattgtttcttgtacttgggtctgttgaaatgggtccaattctcatgtttcgattggaatggaacataccaagtaatcgggagattggtagtaaccttattcatgaatgtatcattgtctaatatttaatatgtagagcacaatgtgacttgtaatttgtcatgttagagtgcattacagtttcatttacttttatgaaaaaaacaatagtgtctgtccacgaaaatcattgaatggatgaggttgctagcaccgattaaaatcagttatattactcccccaaaaatatgaaccacagg

SEQ ID NO: 116546 - DNA, 886 bp, Physcomitrella patens
  Intron number 1 from transcript Pp1s31_388V6.2 (locus Pp1s 31_388V6) derived from phytozome v7.0 (chr-ID scaffold_31; pos 2329987 to 2330872 reverse strand)
atttttccagcttcgtccggcaactcaacacttacgtaagtcattgtctttctctttaagtcttgctcctttatctcaccctcctttggtgacggtggtaatggcgtcagggtatcttgcaggtactgtttgtacgtgttccttttgaaatgactgagtgcttgggctgtgtgtatctctcaagtttctcctgttgtttgatcgtagtgacagtcttcctgtaatttagaggtgatatagctgaaagaagtttcgatattcgtaatagcttaatgtgctcaactacagtcctcagctatgcgagtcacgccgttgtatttcttattcactacgtttctctttgctgcttgtctagaacactatctatggccaatttgatgtttacaattccgtctgatgggcactaaaaattctagtgagcactctgggaagttttccctgttgcatctgcttgaaagttcttcattttgttctctgtccagtatctctttattattggcgtacgctgaatgctgtaccgattcgttgtctcgtacttcatattgcagagatagcttttgttagtgccattttatccgctcacaggattttcgctttcgagacttccgtttttcgtgtttcaaacttctgcacgtgcttaattttttattgcaaccgggagttctaccgcctatatcatttattagtctatccaaatcttttaacatacttgtatcttgatatattctgggcatgatttgccaaagtctgagatttcctagtgttgtaaattcactcttcaaggaaacttatgcggtcatgtatccccctcattatcaacagttccccttttcctttttgacgcattgattcgtcctggagcaggtcttgggtttttcaactgaag

SEQ ID NO: 116547 - DNA, 405 bp, Physcomitrella patens
  Intron number 1 from transcript Pp1s122_37V6.1 (locus Pp1s 122_37V6) derived from phytozome v7.0 (chr-ID scaffold_122 ; pos 389641 to 390045 reverse strand)
attcgagaggtaattttttctttcttcatcgacctttgatgattggtgagtggtatttggaggttttataaattagtttatgcaatcaacagctattgtttggtttttggatttcgatccgtttattcgattcgctatcaacagtcaatgaccaacttggtcaagtttaggccatttttcggcgatttttttagatgataccacctctgaaccatgaaatttcaaattttctttctattctcagcgttgtcgtcgttgattatcttgtggacagaagctgtgattgcacttgacgtcattctatcatacaatttattattttttgtttttttggaacactaaatttaatgaattttatcgttttttgcaggttcagcgaagtgtgcaggtgattcgtgataagca

SEQ ID NO: 116548 - DNA, 928 bp, Physcomitrella patens
  Intron number 1 from transcript Pp1s112_95V6.1 (locus Pp1s 112_95V6) derived from phytozome v7.0 (chr-ID scaffold_112 ; pos 577392 to 578319)
tgacgcttgaactcttctcagattgctcaccgcaggtacaattacgatcaatactgatcagctcacgactgcatttgcagtctcttgcgaatgagctgaggagatgatttgaactgtcagattgtagccgagtctgctaagtggtgggttgaatttagggctgcttgagaaagttgtgaggtagcgttgcatattgtggcccccatcgaaattagaaagtcgcaattggagattgttaagtgaaggcaagaataggacgcagatttaatctattttattttaatgttttcattcttgtaatctcttccttagggatgattatttatttatttatttacatattttttcattttgtattcctgattaaactaattacgtcaccgtttctatctactcatgttttaattttcaatttttgattcttcttttttctttttattgtcatgtgtttcaccatgttcacaaccgacctgaccccttcgtgaacgtattcataattaattatctgggaccaaatttttgcaagatgctttacttgcggaatatcctggagggaggattcctggctgaaggctgaagtttaaggcgggtcacttttaacgttggacatcccccactctacagttatggatgaagatctcgcttctctttcaagcttttactaatttttagtcattgatcttgaattcttgcgagtacttcatagatgtgttgatcacccagttgttatgtactcttagcactattacttcctacatagaaaagcacattgttgaggagattgtggagttattggaagccatactatcgagttgccaagtattcaacttgcattagaggtgaatgttccttagattctatgcttatagttcaggcttatgaagcttcacaaagctgagtcttcggatcgataacatgattattgcag

SEQ ID NO: 116549 - DNA, 911 bp, Physcomitrella patens
  Intron number 1 from transcript Pp1s133_127V6.2 (locus Pp1 s133_127V6) derived from phytozome v7.0 (chr-ID scaffold_1 33; pos 1008322 to 1009232 reverse strand)
tgtgtttcttgttgggattcacccagttgtcacaggtgagcttagaatattgccctgtttgcttgtttttgttttgtttgttcgacagtttataaatttattttcaggcaacgaatcgaagggagtaggtcatatctttgtaatgcacttcgagactaaattttttgcggggtcagtcattttatttgtgaaaagtcgttggttttattttaagtagtgcccttgttttcaacacttgagctagattgggcttcccaactgcgtcattgcgacaagcaactgtagaatgtgttgtagtcgttgttgtcttggtaaaggatcttcattcttagaattttaggagtctttctggtggctctgtctgggcatgtgcagtttcaagaaggtaatcgcattgctctgtgcggttggcaggatgaatttgagtgagaaattatcaaaattagtggcttcctgggatgtgtggatgtgcccctgctactgtagagttccactgggagcttgttgggactgttgcgtatcacatagcccaccaccacgtcagactacctgtgattacctcattaattgttcagatggacgttcttcaactcgtaagggtttgtcgattttaacatggactcagttgggataagagtttggctggaacatgctcagccgcagacgagtaatttttgactgttattctcactttgtcccttaattactccctaattatcgataatatgaccgttggaagataattatctgtgttgaaattttcacggtcggcgtcgcattagagatgctaagctgtgtgtgagaaaattactggaagttgcagagtagggacgtctacacgaagatgctgccatataacctttgaagtgatgacaggttttcaagcgaccgcgtcgtgactctctggttga

SEQ ID NO: 116550 - DNA, 726 bp, Physcomitrella patens
  Intron number 1 from transcript Pp1s76_45V6.1 (locus Pp1s7 6_45V6) derived from phytozome v7.0 (chr-ID scaffold_76; p os 262237 to 262962)
tcctcgcttcaggaatttgggtttctcacgcactggtgagacgcactttgcaccgctggaattccctctgcgtgtgtttgtgtgtgtgagtgtgtgtgttctttttttctacattttctacattttctacttttacgttgccttgcgttgcgtatcttggtatagaattactgcgtgtttgaggggggttttgagttgcttttgccctttcaactaagtttgtttcccgggtgggtttcgttggtagagttcagatggtttgggtatatgctatgagcgactcgtctagtgatttgcaagggttgtgttgaggtgaggtgaggtgaggaattggcgacttcgtcttggttaatggagcgcgcgtagattttcatgcgatttttcttggttttgtgtggcggtatatcctgggaggagcttgtgtaattgggaatttgtgaattcttagcatgtgttttttgattgctgtataatgagtgtttgaattgcaggtcttaagctccaaagtgttacaagaaacacatgaactaggtggtcacaggatggttgatactgaatatgaaattgcagttggtcgtatctaattatgttggcatccctgctcttgtttggtagaagcgtattaggcacttcgcgatttcgcatgatttttggaatttctcttcacatttctttggcttttgaacttgctgctgcagttgcaaaagcgatatctggagaagaggc

SEQ ID NO: 116551 - DNA, 683 bp, Physcomitrella patens
  Intron number 1 from transcript Pp1s1_421V6.1 (locus Pp1s1 _421V6) derived from phytozome v7.0 (chr-ID scaffold_1; po s 2543521 to 2544203)
cgtttctgtaccactgtaatctcgtttttcttaaggtgctgagtcctctgaccctgcactaatttcaacctcgcagtagtggtctagcgactgttgtaagctctagaagattattgtggcttctaatgttcaaaggcgacgtggaatctctggtaatggttttgttatgtggaaattgaattaggccctttaaagtggaacttgggatttttacaatgtttttgaatttggatgttgtgtaagatggagtttttatttttgttgtagtagtagtaaatggtgcatcctctgattgcatgtagctacgcgattgagatataaagagtcgatgttttcctgtgaaactgtttcttttcttagtgtgtttctcttattgtttaaatgtgttggttgttgaagttttacattctttcccgacagccagtaggtcaatttgttaggattttcatcatatctgattgaagcattttgaatgttatggtgtttgtgttagttgttccttaaaattcacgggttctctcctgaaaggtaggactcctctggatgcgtcatgaatggatgcgtttagctcattaatgtctcgcaattcactaaaaaactttcactatttttatgttgctcattccggtgaatgtgccatcctaacaggtctacgaagcgatttcattctgcacctacatcta

SEQ ID NO: 116552 - DNA, 359 bp, Physcomitrella patens
  Intron number 3 from transcript Pp1s52_50V6.1 (locus Pp1s5 2_50V6) derived from phytozome v7.0 (chr-ID scaffold_52; p os 702453 to 702811)
gtcgaacaggggttgcctcttctggtaaatttggtgtccttgatgttcttctgaagtcctacgagggtagttctttactgcgcatgtttcataacaattgcgtggtgtcgcctccacttgaaatggaaaatttaagttttgaatggtagataactagttcgtgctcttcaggccagatatatacgcgtttttcttgaggttctgaaatgatgaaaaacttccaggggaaacctcagacaactaggtcctcttttgtattatagctccgcaccttagggattccttttctgtttctatctttgatacgttgacctattttggtgacatggctgtaggttcacggagaagtagcggatcaa

SEQ ID NO: 116553 - DNA, 913 bp, Physcomitrella patens
  Intron number 1 from transcript Pp1s124_47V6.1 (locus Pp1s 124_47V6) derived from phytozome v7.0 (chr-ID scaffold_124 ; pos 426913 to 427825 reverse strand)
gattcaggtttgtgggtttcccaagatacccatcttatttacccattcagaatggctctttctctgtgtttggggagctccttggaactaatgcgttagtaatttgtttcagactagcgaggttgaagcaagtttctgtgttagggtcatgaaatctgcgcggttgtgaggatctcgaagtgaattttcctggttgcgtaattggatgtctggaaggaatctagggttttcgcaaagttgattagatggagctggatttcactttcatcttgtttattgtagactgagtctagaattttgcgccctgtttgctgctgtgatgtgttgcatgtatttgatcgcgtagtactaatttttaaatatcctggaacttggtcccacgattcctttgaagcgaactcaagtacagatagagtggtggattaatcatcgcgatggcaggggcgtgccgtgaatccgctgttcaggatagggatagtttttgtatcaggtccagcttgcattgttatatgtggtttttctcctacttctgatgtggattttgcaattcacaatcgtggacaaatgagctacgtccaacacgaagattgtttttaattttttcgctgtaatctttctgacaaggtgaaggtttgatgatttcttggtatgtttggtttgatttgattggccttccacaaaatttttggatttaaatgtacaagttcgggacttgttggggttgcggatcttcttgcatactttttgactcataacctagaagaattgttgaacttcaagtctgcttgcaacgtattagcagaagattggttgtcccgaaggcaaagacatactccacccagcttcattataatggtgaactatatatttgtttccttatttaatcgatgtcttttgctggacctgatcacag

SEQ ID NO: 116554 - DNA, 571 bp, Physcomitrella patens
  Intron number 1 from transcript Pp1s192_12V6.1 (locus Pp1s 192_12V6) derived from phytozome v7.0 (chr-ID scaffold_192 ; pos 64250 to 64820)
tttaagtgagtgcctctcttcgtagcatttcatttccttccacctcgaaaatgctggaatggtgttttcgattttctcgaagaagaacattgaatgtattcaaaatcatcatctcactttctgaaatttgatcgttgcttttacaatctatcgtttgccgatttcccccaaattgattaactctaggttttcgaaagagggtttgtgggtttgtcaccttcttggcgaacaagcaagctcctgtctcatactgcgtaattctctgttattttcttccgcaaattattggttattgacttcagccataggttggtggtattgagtttgtccgcaacgtgaaagaatttccgaactctgtattttgctatggattttatggacaacccatggctagtctctaataataccgcagcttgcttaaaattcgatcatcatttggaggggtaggattttaatttctttcgactcaagggtttccttcgttttagttcagctacgtatttttcattcttactggtttgtgttggccactctaggaacttgcccagacaccagttcggcaacttgcaag

SEQ ID NO: 116555 - DNA, 216 bp, Physcomitrella patens
  Intron number 1 from transcript Pp1s3_476V6.2 (locus Pp1s3 _476V6) derived from phytozome v7.0 (chr-ID scaffold_3; po s 2794895 to 2795110)
ggcggttcaagaatacttcaggttactcttggtcatgatttttgttgtcgcttatttttttgattgtttgattggtgacctccttgaagaataatttttgtttttgttacgttttgtttctttttccttctctcatgtatcaagtaagtttaagattagtcgaaatcatcgtggtgtgatgtgtaacgtggccttttcttcccttgcaaacaggcc

SEQ ID NO: 116556 - DNA, 541 bp, Physcomitrella patens; identical to SEQ ID NO: 116364
  Intron number 1 from transcript Pp1s98_84V6.3 (locus Pp1s9 8_84V6) derived from phytozome v7.0 (chr-ID scaffold_98; p os 468768 to 469308 reverse strand)

SEQ ID NO: 116557 - DNA, 691 bp, Physcomitrella patens
  Intron number 1 from transcript Pp1s117_124V6.1 (locus Pp1 s117_124V6) derived from phytozome v7.0 (chr-ID scaffold_1 17; pos 848998 to 849688)
gctttaggtatgttgtttcattcgggtttcaattcttgtttggctggtgagattttccatggagttttgaggtttttcctacttcgatgaaggaaatcgggagggggggaggggacgaatgagggttcggtccctttcaattgtgatgtttgatttatggtgggaaagtggggatgctatcgcccgtattgttgaataattttccgggagagtagcgacgggtaatcgtgcttgattgttgcaagtggtgagaaatgtagcgagtgcactgggcactagtttgttgttatttggatgctatttggatgcaggggtttgatgtggggtattcttcaatgtggggtacatgcagccatcattttcatttttgtttttgtttttatgtttttccctccctctctctcctgtggtactccgtttgcttttatagcctgcagactgcaatgtactcatgcctctgaatgacctgcctagggtcatgtggtatcgtgctcaccccacactcgaacagagaatgcattagattctgatggttgatttttgggatcgtacttcatgctgtgccttgtggtcatgacctggatgttcaattcagctgcccaggattttctttgtgccttatccttaattgtttctatttggatttcctcatgcagagcttccaggtttctattttgattctgaattgaac

SEQ ID NO: 116558 - DNA, 858 bp, Physcomitrella patens
  Intron number 1 from transcript Pp1s31_183V6.1 (locus Pp1s 31_183V6) derived from phytozome v7.0 (chr-ID scaffold_31; pos 958888 to 959745 reverse strand)
atcgccacgagtcggtttgttcaagtggttcggaggttgtatgtagttgattttgcttttcctagggttttgctcgtggtgttggtttttctgcacgggtcctctaatcccttgttcgttcttcgtgatcggaaggctaatgtagtgatgtttagttctttgagattagctctcgtagatttctttctttatttcttttgaaagcagatcccagggtgcccctgctgcgtaggaaaccgaagaattctcctgcgcaagctgtggtggccatgaagtccgtgactagcacatttagcacagttgttttgtttgtttgttttgttttggattctatttttcctgtaatgttcaatggtgcacacgtgtagggtcgatgtttttaaacagtcaaagtgcagatttactctggtttttttccacatacgaattgatttatgcttcatgaaaatctgtgcctctgatttcaataaaggccagcagtgtctagaaaactgtgccgttgtggccaacttctagatttatgaaggagttttagtggtcctgcaattgctacgcccgggtgaaattcgctttaaatttatctgaccgccggggccattctacctggactctagcatttgctgccctttatggcggtttgtatataatatgctttcattttgctttcgtgcgactccacgcgcatgattaacatgtttatatctagacttcattgactttacatgcacggtctttgcatcagtctgtgtttatctgaagtcgttattagtttgtcctcagttgtttttgacgtatgccatttcttgcggctggtttttgcaaggtttttggcgaattgagcaggaggatagcagattg

SEQ ID NO: 116559 - DNA, 709 bp, Physcomitrella patens
  Intron number 1 from transcript Pp1s75_164V6.1 (locus Pp1s 75_164V6) derived from phytozome v7.0 (chr-ID scaffold_75; pos 874292 to 875000)
ctgaagtttagccaggtaggtttgggatccacctgcgagatctttttcggcacctggtttgtttgtttgtttggtttttttgggagggagtgtttacttgcgtgttagtcgcggtgatgttcttgacgttgcgtgtgatggagggaatagtgaaatctgttcgttttgtattattttattttattttattttattcttttgtagatgaatgagcttatgattcgcattccggtgagtctggtgggtctttctttacatactgaggaaattgtttagttgttgctgttctcatgtaatctctcgcgtgggcggaagggaatcccagcgtcctttgatatgttaggattacaagtcggtcagtttgctctgctttgaattttcaatagggaatgagagccaagaagagtaatgtggaagaaatttatggcgcccatgcttttcgctattgattagaatgggccgaattatttgtttgctttgtgtagataattttctctgaacttctttgctacgttgccccttcttttcttttcttttttgttcttaacgcgtcaagagtttcagctacacgttactatgtttggtttaatctttctacgtcgaagtgttgtctgttttgacctccgtcgcagaaaagagttgcattcaatggctccatattaatgatctacccattagaatcttctaaacagtgtacctgctttggcag

SEQ ID NO: 116560 - DNA, 903 bp, Physcomitrella patens
  Intron number 1 from transcript Pp1s63_54V6.2 (locus Pp1s6 3_54V6) derived from phytozome v7.0 (chr-ID scaffold_63; p os 596356 to 597258)
tgtctggttctgctccttcgtcaatcggttgctaggtgagattctctctgccttgtggtttcatatgtgctgtttgtcaactgtagtaggctgttgttgtgttgcatttgatgaatttctcttatgttgcacggttttgtatccggaagggggattgataagatttggggctttctctgagttgtttcttggcgccgaggaattagccaactagcggtggatgtatcggctcatgggtagtttgttggactgtttctcgtaactttgtgaggcattcgtgttttgattgtaactctagctgtccctccttgtcccacaggtgagatatagtcttgcgtgtatggaacgatttgcttcgctttgcagattgtgggcaatttgcttctgcatgcccgatgccagttatgtatgagttatgttggcctctgcgagtagcgtatttcttttcgatgtggatgatcctttctgtaattagaagctttcgctctagtttggtttgcgtttggtgttgtgcgatggcttgttgatagtgtcgattgtaactgtagattctacattaaatttacatagccaataatgcgcttaggcaagagaaagctttgtgcttgtcatccactgtgcggatagcatcactaacgattctgtttctcatggactagagaattgtgttagaaaacagaggtttacggatctatccctttacaggtatcaaatgttaagggacatctcgtcgcggtcgttgccgcgaactatgacaaaccgttgtcaatcctctatttttatttttgtttttatttttaaattttctgtgtttcacttcttttaccagattctcttgctcttaacaaagcatggtctcactgtgcagtcactgtctccagggacaatccattcttgagccat

SEQ ID NO: 116561 - DNA, 320 bp, Physcomitrella patens
  Intron number 4 from transcript Pp1s425_12V6.1 (locus Pp1s 425_12V6) derived from phytozome v7.0 (chr-ID scaffold_425 ; pos 115841 to 116160 reverse strand)
ataacaagcacaccaccattgaattcactggagaggtaatttgatttcttagtatactttcgtgagttctttatttacttaacgtgaatgcatctggcctcgacggaccctaccctctagtttgcaaactactttgcattacttactacgtctccgcaaattgctattgcaagttcgatgttctttgtcagcgttcctgcccgaattgttttctgttttaccttaagtaatgttgttcgtcttcagtttttgatttgattaatgatttaaatttcttctctttcatggtttaggtactcaaaacaccggtctcattggac

SEQ ID NO: 116562 - DNA, 679 bp, Physcomitrella patens
  Intron number 1 from transcript Pp1s230_9V6.1 (locus Pp1s2 30_9V6) derived from phytozome v7.0 (chr-ID scaffold_230; pos 113491 to 114169 reverse strand)
aacctcttggactttacgattgcgaagaattcacagtaagcaatctgcagataagatactaccattctaacgtgtggactgctttcttgacttcttcatgccacaaatcgatactgccgctggtgatgtagtaggcatgatgatgcgattatgataagatctgtgctttataatctctcgaaccaacgttgctacacgtaactaaagcgggactgtaaccaatgacaaactaataagtgtaattttgattagttgtgtgtaacttcattttattaggaatcatatgataatttattcaattttatggagtattttgctcacagtttcaagacatagcaaaaccgtattcgacatattggaagattgtagactgctaagactgtcaggagtatttcttaacgctagagtgtatttctaaatacgaagactcgttagctacgtggatatgcttacatgccaagatttctgcgaaagtccctgagatctgccaatattttaagatagctataaccattaactttcgaccttagaaataccttcataatgcttacctgtgctctaaaaatgcttagatgtgcctatcaaccatttttctatccggctgcatcaatcactctattgaatgaatcaagttgaatgcatgaaacccgattctgcggagttctacaggtccaaacag

SEQ ID NO: 116563 - DNA, 573 bp, Physcomitrella patens
  Intron number 1 from transcript Pp1s184_48V6.1 (locus Pp1s 184_48V6) derived from phytozome v7.0 (chr-ID scaffold_184 ; pos 278842 to 279414 reverse strand)
ccgggtgagtgagccgcaattgatggatttcggcgtctgttggcactgaacttgcgtgttttgagccatgatgccatcgcggagttttcccggaatttttattgaggagttggttgaattctgacttttagacgtgtatgggtttctgtagagaggtttattttacacaacttgtaaatatgtggtttacaactgaaacaatatcttcggtctttcttgatattcttacagttccacacttaccttcccgcgtcttctcattgtccccctttgttttgttgttattgtttgttttgtgtcgtgtaggaattgatgctgtgttcgattacgaattttgaatcttaaattctgtttgacgctggtgaagttggtttgagcattgcagtttttcacatcttttattagaagtgaaatcgcgaggaaaaacctttgtgcttgtgcctcttatttgtgatcctgaatcacctactgagttccgattagctagaggatttgggtccaattattaaggtgcaaatgtgctactccttacttctggcgtttttgtggaaatcagtgtgccaggttttgagg

SEQ ID NO: 116564 - DNA, 961 bp, Physcomitrella patens
  Intron number 1 from transcript Pp1s48_23V6.1 (locus Pp1s4 8_23V6) derived from phytozome v7.0 (chr-ID scaffold_48; p os 322782 to 323742 reverse strand)
tgtgtttgcggcaaggtaggggccctgactgtgtgtttggaaatcccggagtggtccttgttggatgcgagggtgtgaggttatctatctatcatctaggtggtttggtttggtttggtttggtttgtcccttctgcttctgggaacaggcgaggagttgtgatgaatttttgaggcagtctactattccaggacagagtagtttttaagagggagtatgcgtgttactgggaagactctgtgaatccttggacatgttttagcacgtgattgtgtgcaccacgcgggtgacacgagctcgttgatactgcttagtttacgggtgtcgcgagttgtgcgtcccgttgactgtacatgtgatttgtttttttagttttatctcacttcagggagtggttgcttagagcaaccatggggtaaggttcttctgacttgtatgtcagagatctcggttcatcacgaggataggatgttcgtggagtgtgattgaggtgcagtactgagaggtgtccgtcttcaccggaggattagagagtgtgagaaattgtgcttcgttgtggagttttttgtattctgttgccgaggtgaagactgattgcaagaaataggtgtagacatgaagcttggtggacgaacgtttttttttttttgtctctcccttgttaagcctgtggttttgttgatccctactgttttcttgaatatatgcttctttcatgtaacacctcgtatggtggttgttactgtgatcgtcccagatgtctttagagtatccttgtttacagtgactctggtggttcctgctcgaagcttgcttccctgcagtgtcctctggattttatttatttggaactcttgggaattaatcatcagtttttgcttttactttaaaactaatcggagtcgtggttgttcatatgcaacagattttctttttgtaaatattttcggctatatacat

SEQ ID NO: 116565 - DNA, 438 bp, Physcomitrella patens
  Intron number 1 from transcript Pp1s29_335V6.1 (locus Pp1s 29_335V6) derived from phytozome v7.0 (chr-ID scaffold_29; pos 2463509 to 2463946 reverse strand)
ttgctggaggaactgttccttcagagtttcaaccggtgagctaagtttctatgtgttgttcggtccggtacggcttatagttatgcccattgggggaaattatgagaattccaaagggatccttgtgataatctttgctttagggtttttcgagttattgactttttaattagtataggttcttcattatcattatcaaaatatggtattcgttacaagaaaagtcttctctgataatcactggtcattacggccgttgcaatttgtcaggttagggttcggacgaagttacagcaattagaaccacttgaataagaatttcactacatcttttagtagtattttgcttcaaattatggctttttttttccctttgcttctatgctagaaatttacacatctgtaacctgtttcggttcttttaagggcattgctgca

SEQ ID NO: 116566 - DNA, 1007 bp, Physcomitrella patens
  Intron number 1 from transcript Pp1s52_156V6.1 (locus Pp1s 52_156V6) derived from phytozome v7.0 (chr-ID scaffold_52; pos 1404448 to 1405454)
agtccaagcagggtctcgatttcttgctcaagctggtaatattctgctacttctgtgatcgcagtagagattttcaagagattttgacgtgtgcaatatgaaaactttcacctatcatcaaatggatccatgtgataattgttgacttgtgtgtcctaaagcattccatagccataagtagaaaggtttttactcttgtcagttagggcccactgattataaggtaaagcgtggttgacaatgtcggtgtgggaatgccaaatttaagaagggcattgaatggatatattgttgggtattcttatcttggaatagctcgccatggacattgagttttcgtttttcgcagtgcactttaaacagttacggttgtgtgctccgaatactatttatgacacactttctgtccattaaccctgtgtgcaagaatgtgtctttgaagtttgggtccctttcacaaaaacttgttcggctggaagagcacaatccgcacgaatgtttatttcttcatcctttgtctttctacttttcatgttccagttcctgtgttgaccgcctggtacattgtttagtagatgctgatttaagatctctctctctttctctctctctctctccttttctttgtttgttgtttgcgatgcatcagtctttgaattggaattttctgcaaacattctcttttctccaacacacgtgtgaagctgagcttgaagtttatgtaatcaccatgactaaaagacagtgagtttcctgattttaaaagaaaaatctagctgggcttctgttgtgctgaattatgcgccattagtaggcaatcctgaacacttaaattttcatcgtctagagaaggataggggacactcaatggcaaagtcattctaagaagtcagttgcctgccgaacatatgaaacgacgatacagatgtgattaaagcggaatcagtgatggtctcctgtgttgtatcacagcttcccagaattctaccagctgtagtgatcggtgt

SEQ ID NO: 116567 - DNA, 800 bp, Physcomitrella patens
  Intron number 1 from transcript Pp1s1_66V6.1 (locus Pp1s1_ 66V6) derived from phytozome v7.0 (chr-ID scaffold_1; pos 355233 to 356032 reverse strand)
cttcatcggagccgcagctgccctcgtcttctcatgtacgcaatgtccgcccctgatgtagtttagaatcgggtctatttggtgatgggtttcgtggtattagatggatttttggaaggagtgctacgtccttgagtgcgacctaatgggttgtggttcggatgttgagattcggcgctgattcaagctttgcttccgtaatcgatgtttgtggttgtgttggacgaattttttttagtactatctgttgtgagtgggtgccttctggacaaccgtggcacggaatggttgtttttgtctgcgaagatgtcgcttgcgctggtgtgctttgtggggcgagatccttgtcttgttagggttggactgtggtgatgctatttttttgatatggagtgaggtaatggattagggtatattggagacgttcgatgtttgtagtttgtcgatgcgaggtgtacgtattacaagtagagattcctgcttaatgactttaaaataagtggtgctgtcgaaatttgacagtttcgtatgcctatgcgtgatttgtattagaattcgcaagagttccttttagttcagtaagaattatttatttgatgtaatattcatttaatgagctttgttgtcttcttttttggggacaaaagttgtggattagtcgtacgaaaaactgatacaaaggattggctattgttgtcgtagcgtacaagattttcaccgtgcagtttaattttcttatttggagcgtgattttgaacttcctggactctgacaaagcggtggttggttttgattcaggc

SEQ ID NO: 116568 - DNA, 1035 bp, Physcomitrella patens
  Intron number 1 from transcript Pp1s351_35V6.1 (locus Pp1s 351_35V6) derived from phytozome v7.0 (chr-ID scaffold_351 ; pos 286259 to 287293)
cgggctggtgcacggggggcatatcgtgttctgaggtattgttcgggttttcccctgcgatgttgctgtgtatggggattcgtcgtcggaccttatcacggtcctggtatttttagctgtggtgtttgagtatgctgaaggatgtgctctggcaacgagatgcatagtgtggaagcgatatctttcgggtgtgaaggtttatcatttctttagtccaaggatcgtgtagcgcttctcaaatgtggacctgctgtcgttcggtccgtcgcttttgattgctgttgtttttatttctttaaataatctgttttaattttaaaaaagtgatttaaagattaaaaaaaacgatatggcttggtgaatacgactcgcgtttggaaaatttctactcttccttgttgctttcatagtacagtcatttttcggatggggtgttgttgttagcagccacacagttttttagtcgattgaaatcattaattttaatagaatgctcttgtacaatgccccttagcaatttctaatgttgggaatcttgacccgagcttcctttcgaattttctatttatcagtttgcggacagtatagtttggttatgcatgaggcacgatttttttaagatctccgtcaatttgtcaggattacggaagctttgtctttttaattttattgctactactacatgtttttttatgtttaatttattttcacagcaaaggcaacgtttcttccatgagtagttcctcttgtggtcatgctagcagtgctggagttgattgcgcgacttactatgcaaatgttttaaatgtaggtccaggcagttatttctgctcaagttctcgtgtccaccgacactgtagattagcgttgtagaaagaatctacttcttgtgtagctgtagaaaaggagtgtaaaacctaaaagaatagagcttaattttcaggggttggactccagtgatttggggctatttaacaaggtttttatgctgttcatgcagtcacgcgcgaacatcaacatttggaatcttcgtga

SEQ ID NO: 116569 - DNA, 1049 bp, Physcomitrella patens
  Intron number 1 from transcript Pp1s76_57V6.1 (locus Pp1s7 6_57V6) derived from phytozome v7.0 (chr-ID scaffold_76; p os 341538 to 342586)
atcaaaggtggaggaagaggaggaggaggaagaaggtatatttcacgatcgggttgtgtttcatagcatggtgttagttttgtatgagttttggctttgtgggcattgaggggtttatcatcttctgatgtcggtaagtttggattatcggagcttattgtgtgtgtttggtgatcgggagatgtttcaagagttggatcgtgcgggttaggtctcatgtgtgttggtttggttattgcttttttttgggttggcttgcttcttattgcgaaacgatggtgctctagctttcggttgatgtgttagggtgtgcatagaaggtgcagaattgtggtagtctatttctttttttctatttttgtgtttctctggccgtgggttgaagatcggatgacattgtctctgcagttattcgatctctgaaagctgtgcctcgattttagtcaccatattgtgagaactcacagttgcattctgtcgcgtttgttggcgaactcatcattcgcgattgtagttgagaatatgccgggaattatggttatgaagattaaagaaagcataattgctttaggtgtcataagtgatgcgtcgtagtgacctgttggtttttgattttatattctaacttacatcagattttgtcacgtctctcttcacttcttcctgactggaatactcgagtttccgtcttcaggtttttagtctggggattgtgaccatgttctttgtggcattttgtgtcgtccgtggactttttgaagggtcgggtacgtggatcatgaattttgcaatctcaatattataatttttgccgcaatgcttgaatattgttgcgtatatatcagtcagattccgactccactgcattgagtatgtaccctcttgtagtcgaaggtccttgcatggttcagtgtcatttgagagtcatctgagttgtctggcaacattttatagtggccattattattatcctgtggtcttcacttccgaaccgggctgtgttttgtattacaggaaacctgaaaccttgcagcatcatataacagtgg

SEQ ID NO: 116570 - DNA, 1021 bp, Physcomitrella patens
  Intron number 1 from transcript Pp1s255_66V6.2 (locus Pp1s 255_66V6) derived from phytozome v7.0 (chr-ID scaffold_255 ; pos 571566 to 572586)
tgagcgtacacaagaatcaccgcgttgttgcattcgtaagctctacgacgctgagattttcctgttcgttgcgtggtgagcttgtgaatgcagattgtcggcagtgctcatgtttgaatttgaagtggtttctgttttttttcttccccctttactggtgcttagattatagagtaagtgagtatgtgggttgttgagtgttttgaaattgggtattgagcgatgagcagttttaagggatttttttattggcttgcggatgcagaattggttcaaggtttgaggagtggttggaaggtcgtgtcaaacgttctcggttcacttctgcgtcgtagcattttttctagactttttctgagtggtgtaacgtcaattctcactgtgagaggatgttctcttggtggtcacgctaaagcagaaggattataggatctcccatgtggctcattcttaccaacgaacggatttcttcctcgttcttcgagtggtcatgcggtgaattagtgggtcgacatcacgtctgcacgtacttaacccgatcttgcgttgaagaaatcagagaagggcctggagccaggacgtgttttcttgggactctttgtaatgctgcgctgttattgtggtagattctagtgattcgttgacagaaagttccaaccagttctgttcatgcaattctttttatcaagatatcgaatgtgtactttagacatggagtttaagcataatttaggtgagcaatgaaatccagttgcgaggagttctttcatattgtggcaatctcgctgaggacattttttatattttttaacctgacatggaaatgattcccaaagatgaattggagtttggattgcccgggtgtggataaacggagcaaccaacacacaggattgtggattccactcatgttatgttattgtgccaatattgatatcgaacttctatgtgtcttttgaggccgtgacaaatgtgagaagaaatttggtggtttcaggagaagattgatagagaattaata

SEQ ID NO: 116571 - DNA, 885 bp, Physcomitrella patens
  Intron number 1 from transcript Pp1s267_16V6.1 (locus Pp1s 267_16V6) derived from phytozome v7.0 (chr-ID scaffold_267 ; pos 122627 to 123511 reverse strand)
aggtgggcaatttgtgcgctgcgtactcttgctgttgaatctggtgcttttgttttttgggtctagtttttggggttcttgcagatcttgaatgtgtgtcatgcacggatagatgcagtggccggttttcgtttttattttatttattttattttgtttttcttcctaatcaggcgtttcaataggcgttagttggagtgattgccaatagagcttggtcagtgtgaatggatataataactccttatgatcggagtaagatgggtagatgttttggacaactcgaacttgttcgtaaatgcgatgttagactgttggcaagaattgatggatttacatacctaccctaattttgttctctgttctcaaaactttgttgcggtgacataatacccattctagggttttattgctgtcatgagatgcggacttgttttttggtttgtttcttaccccccccccctcggatcgtttctcttttcgggactgaatattgattagcctacaaccctaccagatatattttatggcgctttcctcgttaggtttcgatgaattgtctcggaaagaatgtttatcgcagaaatggttttgagtccttgcaaataatttagtgtacattctttcatgcaacgcagctagctaagtaagaatgcgcgaattattctcatttaacgatcggatttattacgttcatgttgcacttcagaaatatgttttggcttcaactttactctaattcagatggaaaatttagatgcgtaactttctcactcaagctcctgcatgccatttgttaatagtgagctggtttctcaaacttttgtattatttattttgttttctgcaggcggagagatattattcgcaattagagaaacggat

SEQ ID NO: 116572 - DNA, 914 bp, Physcomitrella patens
  Intron number 1 from transcript Pp1s34_31V6.1 (locus Pp1s3 4_31V6) derived from phytozome v7.0 (chr-ID scaffold_34; p os 226206 to 227119 reverse strand)
tgcctgcgagcttatcttccaagagcgtttcgactgtacgatcctgtcacaactctggttttttcctctatcttccgattgttttgttacgcactcggttggtgtcattgcgacattgcgtgacgagtttgtgccgattgtgattgcctttgtaacgtttgaagtttgtagtagtttgttcatggtttgaggtttttttggagttgatcgtatggccgtatggttcgttacgtggaatctggttttggaataggtattagttttaatgttgtgagggatgggaggtttgtgcgctttgtgccggctactggtacttgaccacggcgttgtttctggtactggaaattaggcaatgtgaaagaatttgattattagactgacgcaaaatctgctttcgaattctttcagcttcagctccagtgatttctatggtgatattagtattgataagaaaatcctgcattatgtatcatgcgggcagggacattggtgtatttgtatttgtattttaagttaatgttcttgacaagttttgaggttccttcctcaagctcctttttttatcttccgataggtgaagcatgtccacgctctgtcgtattttaaaatgaacatgttaatgacatcaaaggggacatttgcattgtacttttgacgcttgtctaactggtcgaatttgaagtgtcttctgtaaatcctggcactgggaatatcaggtactgataaagatgaactagcaagtaaccatgcgtatctccttaaaatctgtagtcaatttttttagcagataattagcttaagtttcgtgacaatgggctttgtttgtaacactgtgatatggaaagtgaacgctcgcaatttaccacatcagagttgaactaaccattttctgtagatattcgttgattgtaaag

SEQ ID NO: 116573 - DNA, 1028 bp, Physcomitrella patens
  Intron number 1 from transcript Pp1s86_135V6.1 (locus Pp1s 86_135V6) derived from phytozome v7.0 (chr-ID scaffold_86; pos 939813 to 940840 reverse strand)
cacactggtaaggacgactttgctcctcaccttgtcgagtcttggactgcagacatcgcctccgtgctatgacctggactgcctcagatttgtccaaatcggcaactcgtaggtggtcggaggcgccatgccgagctacaccactcttgaaaaattaaataatgaggaatttgtcgttgttgacattcaagtgctctacgacttcactcatcttgtctagtggttgtctctcgccggcgtgtatattgggtactagccagcgtcaatatacggcagcacttatttgcaggggaccgcatccttagtacagtggggaggcgaggtcgcctgaaacaagaggaacgacacggctcactcgacgactgtgataggctctggtgaatttcccaccgtgcactatcctttaccagcgtgcgtgacaaacatcacgtacgcgaatgcggtgtctgaagttacaaacttggatgccaattttacgtctctgacggaacttgcattccagacggatctcagtgagttatgacatagcggtggaactgaataactacacaaattgaggcacttgtttctttttcggaggacctggaggaaacaatgctgcgtgtgggaactcgccatgatccggctgaaagcatgaattggatactaaacaccagcagctgattgcggcggatctaatattgtgttttcacatggtggcaatctgtactacgctagaacctaaacgcaagcaagggataaaacaatctgtagttgaatgtgcatggaaaaccacaaattcatactcgattttgtgaaatcatcgcctgtgtgtgttcctgcgaagataaagccaaagaagatgttcgcactgcctgaaaaaagagcgggaggaattatagcaccatgctcattattgtgatcactttcgtttcatattgaaaaattatggctgggtggatatgtcaacttgcttcattttgtggccatcccctttgatttggcttcttccaggccatcacgacgctctcataaccagcaacgagaac

SEQ ID NO: 116574 - DNA, 912 bp, Physcomitrella patens
  Intron number 1 from transcript Pp1s440_14V6.1 (locus Pp1s 440_14V6) derived from phytozome v7.0 (chr-ID scaffold_440 ; pos 98545 to 99456 reverse strand)
aacaccctccagctcagccagctgcagcgggtatgttcacgggtcctcccgcagtattgaatccgtggtggagtttcgcgtcaggttgttgttgtagtagttgttgcagtccgaacgtttgtcttcattgaagttgacatgacgacctgagcgtcgttgaattcgtgagatttggcatttactgtttgaggttttgtcagttgagactgggcgacactctctcccgtgcgttggacctggtatgtggacatatttgattctcccctagctgggtagcaattcttgaaatagagtggaaatcgttgacgtactcgactcatgaactggaaatgtaatccttcgccgttcttggcttcggaagtagcctggtcttctacctgcatttagattgtctcaatgggggtgtcttcaaagacatgagggcgttggtacttatgaaatgatatctggtgaccatcaatcttaagtttctacaattgacatgaaaggtttgcgaaaaaatgcattcgcagttgaattgatcgagtcgggtgcatattattgcaacagctccaatctaaaagccatttttttttcctacgatttctcgtaagcgcaaaggagactcttcacataattggttagattcgattttttctaccttaaaacatcaccacggaacggactagtgcaggaggctacgtggctacatgaaattctaacgtgtgcatgagcgtacccctaggtttcctcgccttgaacacttctaaatccctgagtccatacactgggatatattaggtctaagtgtacggacagcagtgccttgtgaaggaaattgcactaagtcataaattttttgactgatcaacatcacctagatgcattcctttgacgttgtacaggacgctttagagctccgaacctacctcc

SEQ ID NO: 116575 - DNA, 885 bp, Physcomitrella patens
  Intron number 1 from transcript Pp1s208_67V6.1 (locus Pp1s 208_67V6) derived from phytozome v7.0 (chr-ID scaffold_208 ; pos 294444 to 295328 reverse strand)
ggtgagtttacagacacacttttattctttcaacctcagagattcacattagaagtcacttagtctagaaactaagagtggagtatgatgattagtaatagtattatgctaattgtacccatgggattggttaggttctccatgatcttgatggtcccacataggttaatttacagaagctttaagaaattaggacacttacaatatgtttaggtggtaaatgatggtaaaattcactttgtatttgtaattcacaatcaaattcaaacttttaaccatagaacctctataatacacatatcaacaaagtgcttaggaatttggctttgaatttaattagatattgatggagatttgttggtctccatatgatactgaaggcatcatcaacatctttaagatttctgatggtccttgaatagtaaaatttgccttgtatttataatccatagctacattctaatttctcaccacctaagctctaagctttaaagacatctctaatagaattatccataaattcaaacaaagatacctagagttttgtcctttttattcatttctagttattaaaagtaacccgagttagttctaaatttctataattacatcagagagaagaaaggcaactaagattcatggtacaacatgcaaattccttctcatagggtgctaaatgaatttcacttgagtttatggaccactaagctattccatacttaaaaaggacagaccatcaagatcctccatatccactagatattaagaataaacaaatagtaatatcaaaatgaaaagagggggtatcttaatgaaactgtgggtgagtttataaataactctaatatgttggtggaacttgtagaagagacaatctcagtaagg

SEQ ID NO: 116576 - DNA, 557 bp, Physcomitrella patens
  Intron number 2 from transcript Pp1s274_69V6.1 (locus Pp1s 274_69V6) derived from phytozome v7.0 (chr-ID scaffold_274 ; pos 480245 to 480801 reverse strand)
ttggggaggtaggtcatggacatttgcctcatgtcgagactttgggatgtttgctcatgctttcgacttttcatcattgttatctgccatggtcctctccatgtgcagataacaatttctgataggatctcttctgtactgtcaaactcctgtatggcctaatgtctgtggttactccgccaatgaaaagggctgtgactgtttgttactactcttgaatgcgggcaactctttggggctctcgtcagtttaagccatgttcgtcgcatttggcctctaaaatcaaatctacagctctagctttgttttctccgtgtgggttggtccagcttgagagccttgacagtaatgtgcgaagatacattttttgaaaaatcctgtagtgctatttgtgaagcatctggaagattatcaagtagcgaagacatgtatatgtgaattatgcaagatcctattgtcataataataatttttggtctatttgcggcatcctgttattttgacgcaaatcttccacaggtaattcaatatttgtttcattgtgcaggcgacaagtg

SEQ ID NO: 116577 - DNA, 699 bp, Physcomitrella patens
  Intron number 1 from transcript Pp1s434_5V6.1 (locus Pp1s4 34_5V6) derived from phytozome v7.0 (chr-ID scaffold_434; pos 42064 to 42762 reverse strand)
ctctgcccctcctcgacttcgattggaagcttaaggtctgatgacagtgcttcgtggtctgctttgttagatggtataggatggtgagtcgtcaggtttagaggacgtttggtggcgctgtgtaagagggtggagggggggttggaggggggcgaggtttttgttttagtttgatctcgaacgaacaaagcgatgagtttaattgcgaactcttgttctttttaggatgatgtgaaacgccgtatgtggtacgtggattgctgtttatgggattgaggtacagggtgtcttttcgggcttaatcgagagaattgagcggaagaggagacgctctttgagtcgtgaggaagctactgttaaatttattaaccaactcgagctatgtgtttaaagaatttatttgtaatgagcgggcaaaagtgaagctatttcagggggatatgataacgttgttgaagaatttgtctatatgttggagttcattctatgctctataaaatccttctctcgagaggaatatattttgacccaaagaaatgcgtcttacagtgcaatacgtgggtgaaaagtgtgacctattgtcacggcaatgcttaagtttaccttcttctaagtgttccaataaatgttactttgtttctcaatgattctgttgcttttgcagtacgcagttgccagtggaaatattgcagctgtgaa

SEQ ID NO: 116578 - DNA, 266 bp, Physcomitrella patens
  Intron number 1 from transcript Pp1s112_227V6.1 (locus Pp1 s112_227V6) derived from phytozome v7.0 (chr-ID scaffold_1 12; pos 1066646 to 1066911 reverse strand)
catccaattaatcttctattcagcaaacaaggtaggagaaacaaagattttatttgttttaatttaataatacaaatgattgtttgattaaatttttttttctttagtagaaactattttagtatttaaaaagaactcttatgttataatatatatatatatatatagagagagagagagagagagagagagagagaaacttcttaaagccactcttcaattttgttaaagccacatccaaccctattcctattccacctacgtca

SEQ ID NO: 116579 - DNA, 961 bp, Physcomitrella patens
  Intron number 2 from transcript Pp1s119_132V6.2 (locus Pp1 s119_132V6) derived from phytozome v7.0 (chr-ID scaffold_1 19; pos 1067443 to 1068403 reverse strand)
ctgctcttctttggaatcaagaagttaggaaggaggtttgtagtcgtgaacgtcggtttgttttgtttttgttttatttcgcttggcttggtgcagagcgattttttgcgggtatggctggacttggttgccttgaatcccttgagatacggttaaatttttagatgaagcgatgtttgaggtgttttgtttgtttttagcgagtccgcgcgatgagagtcaagtgaatatggatgttatatttttatgaaagtttccgaaatggtattcccaatgcttagggttgcgatgccgtaccagtagagagagcgtggttaggtctttggggcttagatggtggaattgtgaggatgaggatagtgtcttttgctgttttattttcatttctcaattatttggataaacgagtgaattctacaagaagggttgcagacgttatttttcgtgatcgtggagcgatttctttactatccttgtatggcattttagagttagtaactgttttgcccaactttgcttagcatgtcgagcctcttctattttcttttgtcatttttgttggtattgtgtcaacagctgtaaagagatctcggccattatatttatcttgttatttttcaggtcccagtgccatagttgcggctgagaagtttcaatcatcaagtgtcatagtgagttctaaaacttaatcggaatcctgttgagagcatgcaaaggcctctgtcgatctttttatcaggaacaggaggttattctatcttgccgcggctttatcaaaattttgtcaaggagaagtttatgttgttgaaggaaaacgagtaaaggcttgcatactgcttctctgtgccatggcgtgttcactgtcagacatgtcagctcagtcagcgttggtaggcgcgacattcagtgtgaacggcagactcgaggagcctgattattcaagtgtcaattgatatttcag

SEQ ID NO: 116580 - DNA, 621 bp, Physcomitrella patens
  Intron number 2 from transcript Pp1s336_4V6.1 (locus Pp1s3 36_4V6) derived from phytozome v7.0 (chr-ID scaffold_336; pos 7109 to 7729)
atattctgcgggacatctcgaagcaggagactcgagtatgtgctcgctattatgtacgagatgctcgcagtacattgcttacatatcccagacttcctttcctcatatggaagatgatttatttataatattcgaaaatttctggaagactgctggttttgggtttgactacatcactcctgaaatttttactggatttgtaattatctagatagtaatttgtaattgacaacttatcattgtattctctcatctacacgatcaaatctttgagatgcgaaacacacttctaatacggttttctgtgaggctcataatattgtcaaactcttatttgttttttttacttggcgtgtctgttgtagattcctgtcaaagaactggtttctttttttatttttaagcaacataccattcaattttgttttcttagtcactgaattgcattttcaaacttacatctctgttaaatttaacattgatgaattatttctctttcggagaaaataacctctaaaacaaatggaattattctgaccaaattactctgcaccaaaggtcgtaagagttcccatgatgacattaaacaacctttcaagcaatagaaactttgctggagag

SEQ ID NO: 116581 - DNA, 836 bp, Physcomitrella patens
  Intron number 1 from transcript Pp1s25_131V6.1 (locus Pp1s 25_131V6) derived from phytozome v7.0 (chr-ID scaffold_25; pos 958734 to 959569)
tgtggacgctgtcactgagctcggtggcgctgacagtaagttcatatcctccttcacacccatttctgtgcccttacatctcaacgttctcacattgccaggcctaaaagaaaaatctggagatttgcatttgttttaacgctctagcaacgcatggtctctacatggcaacccacgtgcctcgtcgtatgtgcatgtgtggcttagctcatcatcgttctttttaaaaacaaccttcacaacgagagtttaacgtttttaaattgatgctggtgtctcagattgctttcagatgatttttctcacaagtaatgttgtctaatcgaaaccttagttcaagattctgtcatgtccatattctccttcaatcctgaaaggcaacgacaggaagtggagttatctcgacgacaagctcaaggcatttgctccttccaaaagaccttgatgaataatggtcaattttctcgtttgttatcacggtcactccatgtaccaggatttgagtagagcctatgtgacagagtacaacgtttacttcaatgcggatgttgtcagtggtacactcgataccttacacacgtggttcacgatgttatctctggttatggtatgacaccgtgaaccacgtgttaacgactcgaagaaagcgagtacacaaaatctaggaacacgatttcgccgattaccattatatgatgacataatcattcgcctttgatgttgctgactaagttggtagtaaaatgtatgtcttcgtgggattagtattaggtcatcaaaactaactcgtctgtcattgttgttcacaatggacagaggctacaccgaaatctgta

SEQ ID NO: 116582 - DNA, 1054 bp, Physcomitrella patens
  Intron number 1 from transcript Pp1s313_100V6.1 (locus Pp1 s313_100V6) derived from phytozome v7.0 (chr-ID scaffold_3 13; pos 483548 to 484601 reverse strand)
ggagacgtcgggagatttagtttttgctcgtgatgactactgtgaggttttcgtgattgcaacggtgttgaattgtggggattagaatctgtggtaggaccggaaaattaatttctagaacgagcttgtctgtcgtgaagaagagattgattgtcccctgtttgtctgattttttattttttattttttgttttatttttattttttaaatcactttgaaaaagtagtggttttgtgttgtaattgtatggtggtgtattggatttggcgtaggttgcggttggtggattgtgttagaggtgccgtttgatgtggtgaagtgcattaaacttaagcgtaggagtttatgtgattttctagtttaggttgcagatattgaggctgatgcttgcaaacagtttgtttgcttcgcaaattgaactccaaataggtggcaggtcaagtattctaattagaagttgttgtcaatgttttttttcaaactcaattattcatgccagtggtcaatctacagaaaactgagtttgttgctgtttctttttttcgttttccaggttaaggattggtactctacaaatgctttggattctcgtcgtagaaaattcgagttccctctgatgatttgggttgatcagtggggcgctggaaagtatttagcaaggctatgggaagtaaggggccgtagggttgtggtaattttcaagtgagggaagtatggttttttacggtgttacaataactcgcctgactttcatgaatagataacatggacaaaatctgggactagacgttagcgtgacctacaattctgcttatcaaactgaatcctgagattttaatagttccttgcttggaacaactccctgaaaaggttgccaaaagtttcaacaagatccagcaatattcaatcaaatttacatcatccagaaggggattgcaggacgtgcacttcttaagtctaggttattctggtcacaattcatttcagtatctgctcacataaaagttcgtgcacataggttcgttggtattggacactatctacagcaaagat

SEQ ID NO: 116583 - DNA, 417 bp, Physcomitrella patens
  Intron number 1 from transcript Pp1s315_25V6.1 (locus Pp1s 315_25V6) derived from phytozome v7.0 (chr-ID scaffold_315 ; pos 128957 to 129373 reverse strand)
gtattctcccaataccccctactatggtcattttgccatcttgtttgctctcagtgatttgcctgaggtcgattactcacaaaaagttaagcaaagtatgagtgatcatgcctacacaagtttcctggtttggttttctcgtgataagagccacaagaaaacctcaggcagaaacgttgtttgaatcttcttccaaaatttagagttactttgctcactcctatctcttaaggtttggtacatgataatttcatcgccaacttttccttcccaaagcacaatatgattgtctttttatgaggctagtatatttggaggtagtcttgataaaatttcatgatttgtctatttgtctgggatggtactttaattgaatgtgcagggattgttgtcttcgctgcggaggctttacagatc

SEQ ID NO: 116584 - DNA, 659 bp, Physcomitrella patens
  Intron number 1 from transcript Pp1s34_63V6.1 (locus Pp1s3 4_63V6) derived from phytozome v7.0 (chr-ID scaffold_34; p os 353321 to 353979)
aagcaggtcttggaagagttccacttgataaccaggtacaagcctctgtcgaaggaacatcttgatacttttatcaatgcgatagatgccattgaacatgtgtgccttctgctctcgtgacctgattttgaatcatcatataatgagcattaatttttgagacatgttttcattatgcattgtttcttagggtttagttacatgcgtagagctggacaatcagaaatcacatgcttgaatgatgcttttttttattctttttctttttcttttttgaaaataataaaaataaatgtaaccaacagaattagttgggtccccaatcaaatggattcttttgtgtattattattgagaacattgcaattgcatgtgcttttctacattgtgctttagtgttgattcaagggttggaagtagcaaagaatgcaacggaatcataagttggttagtcatcatagtgtcgaatagggttatcattggaacttatgctcatcgtctctaaggccaatcgtgtcaagagacatggcaccaaaatacgtggatttggccaaagcggaggaagaggtagacagaattacccagataacaagacaaaatttcaaagaggtactaaatttgttttggaattgcttacagacgatacacaacacaagaaga

SEQ ID NO: 116585 - DNA, 732 bp, Physcomitrella patens
  Intron number 1 from transcript Pp1s31_351V6.1 (locus Pp1s 31_351V6) derived from phytozome v7.0 (chr-ID scaffold_31; pos 1944587 to 1945318)
aagccttgcacctttcttgtctccacgaaaacaaggtacttcgttcacgggcagtcttgtccacctaatgcatgataccgtcttgtttttgtatatctaattctcgtgctattcatcatgtcttacttggtcgtgagcgtatgtgttgacgcatggtttgcgtatttcatggttgtctattcttcctctgaaatgacttgttgcacaccgtgattcgttgccaagttttttatcatcccacacttcgtccatgtattactactatagggctttgatttcggtccatggattggtggaatctgtacacttcgtgcacttcattgcatttctttaatctttttcagtacccatgtatcgttcgtttattaatcctcaaccgcttcacttccagtagcgctatagtcgttgtcactgcgtagattgaaacgggcctgcatcaatccatgtctgacctgtagacagttccgtcatgtttctttcttgtcatactctacttaaaagtggtgttgtacaagcggtcttatctctgtcaatgtcttctaattcagacctttgaatgtggagtttgcatcttcatcgactccattctaaaacagtgctaaaaccaagcttcttcgtaattcattgctgacccgatgtttgcccatgctgttgaatgcggttcaagaacaaaacataatctaactactgtggttttactttgataattgcagacagcgatagcttcgctca

SEQ ID NO: 116586 - DNA, 612 bp, Chlamydomonas reinhardtii
  Intron number 1 from transcript Cre17.g728450.t1.1 (locus Cre17.g728450) derived from phytozome v7.0 (chr-ID chromos ome_17; pos 3954122 to 3954733 reverse strand)
aaaacggcgactctgtttcccaaaggtcagtgcgcgtacttgtagtccgcaggggccctgcgaccctccgcgtttgttcgcatgagcaggctctgtcactccttatcaagttacaatttgctgtggtgatatgagaattgatagcttttatggccacaaggatttcgagggttgtgctcgcggtgttgacggtgccgtcgtgcaggccagtcaataactggctttgcatgcagctaatcataaatacgtcgctgcatgacactatggcgcgttcagtagctcatcggcccaaccgtcggtcctgtggctctgcctaggccggcgcgctggccttcagaggcctaggcgctgataattcctcaacgtttttgaggtcaagctccatgtcatgaagcggcagtactgagaggaattttgcttttgggccgcactccgccgacgcaagctagcgcagcagggcgcagcgagccttttcgttggcataactcttaccgaaagaagtgaagaagttcacgtagccggatccacgccagatccagcggccgcatccaggcaccgtgacccttttcccgcgcaggttttctgctgctgctgctggcagtgctgctggct

SEQ ID NO: 116587 - DNA, 1067 bp, Chlamydomonas reinhardtii
  Intron number 1 from transcript Cre05.g233600.t1.2 (locus Cre05.g233600) derived from phytozome v7.0 (chr-ID chromos ome_5; pos 754025 to 755091 reverse strand)
tggcgctggagaggatacatctcggagcgaaggcggtgagtgccttcttcgggcttccttaactttgatggctcattcatgtatgtaacatcagtttctgctgagctaacgggcttttcgtgggatgtattgccaggactgagttcgctggggggctatggcgcgcaaactgtcccagtcgctgatgttctgtcacttttgtaaagctttaccaagcttggtgttttgattaggcactcactcgtgtccggggcggtgttgctgaggggctttccgccttgcgagggtctgcgcgcgctgtaatcattccagggagtcaaataaatgataaatatagtatacttgatactactagggcagaaaggagtcctgccgccctaaaccagccgaagtctgcaggcgaggaggccgggcccgacgcacattgcctttgttgcacctcttgttcagcagtgcatgatctatactcgctgaggaaaccccgcgatacctggcgggggtgttggggccagcaatccgtgcgaattgcgggacattgtggggggtatccagcttgagaacgaggcgctgtgaggtctgcctttgcgaaggaacagggtgtgcttgcttcactgtaacagattctatctaagggcactgcttgcgccctagtgcgtgtaaccgcaagccgcagcgaaaaccgttgaactgagcgggtgtcgtgggtcatcggctcgcatgcaaaccggtgctgatagtggccgtcggtactcaggggaaggacattattgatttgatgggggcagacgagcgccaccgcacgcgtgtagggttttgatgccgattacgacagtttacggttgccgtttgacaggcagaccgcaccgccgctcccctccgcaggtgcaccagtgcggaggctcaagcaacgttcacgtcttgaggagtgagtgttggcgtgcgcgattgccgaaccctgcgcattggtgctccaggcgccaggggatttcggctgtgcctaagacccaacggctcgttacttctgaattgcaggcggcagtgggaaagccgtaccacgcgaagtccgc

SEQ ID NO: 116588 - DNA, 678 bp, Volvox carteri
  Intron number 2 from transcript 65309 (locus 65309) derive d from phytozome v7.0 (chr-ID scaffold_46; pos 770650 to 7 71327)
tcgccatcctctccatacccatttctatttacgaagtgagcggccgatcctaagcgttgtctgcagccttggaagggtccgttatctccccgcgatcatcccctccgcctgctatcgctattgctattgctatcgctattagttgctgctgctattgttgctgctactagtggggtggcggcaatattaatgctcccacggggagcgtcagcgcctagcgctgtgccatactgcgctgtgctgtatcctgtgccatgcggggcatgaggttggggataaggaaaagaacgtccgagctctgcttgttggtatggggagaagatagtagggaagatctgtgtttatccgaaatcgcgtacaggggccgcggcaaaacacgttcacgatcccttcttctttttctgttatagcacgtcatgtaatatggcctacatgggatgtgaacataagaccttctagttatggatcaaataaaacactcaataatattacaagaacttacgcgaattgcactaaattcacaactttgaacttacatttttttaatacccctttgattttctgttgagtatcccctcactttgccttaaattttgtatcatgacgtatatcaccgatgtacggcaaatcggcccgtggacagatcgcgttgcacatcgagtattacactcggcctca

SEQ ID NO: 116589 - DNA, 751 bp, Volvox carteri
  Intron number 1 from transcript 92834 (locus 92834) derive d from phytozome v7.0 (chr-ID scaffold_28; pos 550457 to 5 51207 reverse strand)
agtgtccgagctgcaagtgtttggtacaccagcaggtaagcaagtagagctttggatagagctatggcgaggtccccgtgcacgtgagagtcatggaacggggaccccaaaacgaacggcgcaaggcctcacacggggaacgtaaaccctccccgtcaaaatcgcaacaatttgcatttttgtttggtactttttcagcagctccaaaacgttctgatgctgtaaaagctgcaagcttattaggtgtaatgatgaacgaaggttcaaaacgtactccccgaaccgttccttctctgtaatccataccccggtgctgtcctccagtataaagaaatgttattcaagtacactgggccgtcgttgtgctgtcatatatagcggtatcaacaattacttgcccgtagcccagaagccattgaaaacaaaacctgcccttaagaagacagaaatagtagcgaaggcacagaaagaaactgcggaaaactctgccaccaaagaacatgtgcccttgctccacatgcagcctgatcaagacgaaggtcccgtagaagagtatttctataataatcgtatacatgatgatgtgaatgccgtgggtgaggaggatgcatgatcgggtgagggttcggacattgataaggatgatgggcctgactgccttcaggactcaaatgttgtctgggacatcagtgatcgacacgccggcaacccaccaggcggcaagcagccaaccaaggggggcgagcaagca

SEQ ID NO: 116590 - DNA, 575 bp, Volvox carteri
  Intron number 1 from transcript 86709 (locus 86709) derive d from phytozome v7.0 (chr-ID scaffold_3; pos 1670990 to 1 671564 reverse strand)
gctgcaaataaggcccggcgctgcattgctaagtggtaagtaacatatcattacacaatcgaagaagccaagggttgttgtgaagaataaggacgcgaaggagaagaagaagacgaagcagcattgtgggtgtgaagggacggaagggagcgctagggaggccgacagtggtgggggccccgacagagctcactacccgacagagctgcagcatttaatagcccgtggccgcgtccatgatacgtaatacgtgtagcaaccagatagggtcggtgcttatgggaagccaacccgatgcacttcatttgtacccgcatgggacattgccatcactgccggcagttgcgcttctgcagttgtcctcacgcacacggcgccgtcctccctaacccctagcacgtcctcctccgcgatttgattcttttgttggtttatttatttaatgcccctaaataatccattttcttactgcatactaaacgttcgtcgttcctagttccgccgccgttcctctgcgttatgctgcaccgtgttgtacagggagatccagcgtcagcggtcagcccgtggtcgcc

SEQ ID NO: 116591 - DNA, 585 bp, Volvox carteri
  Intron number 1 from transcript 105433 (locus 105433) deri ved from phytozome v7.0 (chr-ID scaffold_28; pos 1176226 t o 1176810)
gtgggtcaatagttgcgttaggcggcatcgcgaaggtgagcggaactgccgcagctgcagcagtgcgtacgcgtcaatcgcttcttgcttataaccaaccacgtctgcaacactttataatcttctataggttctgtcctggtatattagtaggtagggcggtggatcctattgaatatgccagcagggcacgatcgataggcgatgcaacattaccaactcatttgggttttccacagggccaaacaagctgctaaggcctgtttggctcggtttattatgggctgttgtgatctgcagttgtttggccctgttggctgaggcgctcggtagtgcacgtagcctaaataagtagggcgcgaaccaatcaaacgctatgtatagtctgttttggaataatttgccggacagatttgtctaaacgtttcaacgtctagctatgcatgttctcgctcggcaggtaggtagggttatctaataagaaacgtcgaaaacatgcattaatcttttgcatgtgcacatgcatatgatgatttgctgatgatgatgtatgttctcgttatacatgcctcagtacaacaaatc

SEQ ID NO: 116592 - DNA, 876 bp, Volvox carteri
  Intron number 1 from transcript 88126 (locus 88126) derive d from phytozome v7.0 (chr-ID scaffold_8; pos 143377 to 14 4252)
ggccaggcgcggtggcggtttctggtggtgtggtggtgaggagaaagggaaaagttaaatgagggggacgccagaagttcggactctccggtgatggtcatatgactttctttgcgtttgaccaatcgttggtatttgtttggagctgtgatgtccatagaaactctgcatggcgcgtggacagcaatgattttaagtcgcgatagaaagctgcgcaagttaagttctttcagaatagccgtccggattcttaaggccacttccattccctctcgaagcaatcctaagctttttatttggcgttaagtgctttgtaattgtctttttgcgacccacggttcatcgcgcacgtctggaaagatgccttcaccgtctatcgtgatggctcatcgctttcctatgtaagccctttgagatatcagcagcagcttgtttcaataacaattaatcgcgctcattgtgtcgtaaaacctggctcatcaaaaaagcaatgagacaccacgcacggaatcccgtattgaggactctgcacagactctgcccaaaaggccattcaggaacccaggagcatttccagagcacagcaagacattcctcccaggaaactttccagttgcggaagcgcggaagaatggtcctcaatccttccaatgctgccgtacatggagcacttttgaaatttccgcgcgcatgccgtgcaatcattttaatgagtgacgcagacacccatcggctcaatgcaacaaacgttagcatcttatccatagttaagagcgcacggaaatctgctattgcaaaaggactccattctccgccgcgcaaacccgcacccactagacagccgctagatcaatctacatcggcagcgcccgcctt

SEQ ID NO: 116593 - DNA, 852 bp, Volvox carteri
  Intron number 1 from transcript 107677 (locus 107677) deri ved from phytozome v7.0 (chr-ID scaffold_73; pos 370022 to 370873)
tgttcgatatcggccacggttttgttcaagccgtgaggtcagatccgagtcatgaagtcgcgaggcaaagcttctaagtggcgtcttcagcggcgaatgaggcgtgccggcgctttcctttgagtccatgtttgatatgtttgatatagtgtgccgacagcgcgtttcttgcaagtatgctctttgcctggcggttgtcggttgtcttgtgagtgcaaataggcccctagcacaagatatgctcataagtgtaattatcctgttcagagattaggtacgtgcgtaggatatgttgcaggtgttgtgagcgtagacatcctccttttgcttttgtcacagtttggtgccctaatgacaggttggccatcgttgtcgtaaatgactgcccgttcagttcatcctgtcattgccggcttcaatgttaagcattccccaaaagctcatcgaacagataagcctgggaaaccacatagttaaggtgtatggttatcggacaggcattttggctggagtaccggtatgagaggaatcgaacagcgcacccgtacaagttcaggccactgatccgcggagtctcggacagttgaaaaagaacgaagcgtggcgctctatcttttctccggcaattattacttgttctaatccttctagatagcatcaggagttaataatggactttatgcggccgccggtgatcaacacagagacttcgtcagcatttcgcattacagttctggtcaatatccatatctttttcggcatatggataaaacactttgttgttcgtttaccgcttggcctttcccggttgctggccgtgctacctcttattgcggttcaaatcgctagccc

SEQ ID NO: 116594 - DNA, 955 bp, Volvox carteri
  Intron number 2 from transcript 94927 (locus 94927) derive d from phytozome v7.0 (chr-ID scaffold_40; pos 911671 to 9 12625 reverse strand)
tggtggtggtcagtgacccgcggatagctgtgcaggtgtgaatagaacacggggaccttggactgggggacgagggtgtgtgtgtggggggggggggggttgggaaaggcgaaagtagacgggtggggggtgcgttatccttgaggttggagacggcgacaaacctccataggcgggacctgagtgcctcaatggccagaatcagttttcatgataggtgccgtaccgcttagggaggggccgtacgccgtacggacgaagagataccatgcaggggggaaagatgggtttgcttccgtgggggggaggcgcgagtctgcgggttaccggttgcgactctgcttcgtctgtacgctgtaggttgggcggtggaagccgaggtggaaacttgtcggtactccctgatactgagaacttgcagacatcatacgcttttatgcatacatacatactctttctgtcgcactcctgtacggcccagccgtacgcaccaacgacattcttccgccgagttcgctctcagcggaagcacacagaagaccttatcctttcgtttcactcagaaaacctttacagtttacggactggcagcgttaggcggggtgggaagacgtgggccattactgctggctgcggcttcggctgcggctgctgttgttgccacctactttgcaagtaataagacgtttcctctctcttccctcggcccccataagcccttcgcggtgtggtggactgggtcgcacgcctggcctcccctttacacggcaggggcccccctttccatgtgccccagtccccgcccattttcaatgatcacaatcagttagctatactgattagaaacaagtaaattttgaaattggcttttgacgctgcgtgggagtgatgtcccccgtctccgcccccactgccgccaggtccttggacggggcccggattcgattccgcgcaa

SEQ ID NO: 116595 - DNA, 603 bp, Volvox carteri
  Intron number 1 from transcript 92764 (locus 92764) derive d from phytozome v7.0 (chr-ID scaffold_28; pos 54252 to 54 854)
acgaaccaggtaaatgagaaataccaatgctagcatgatgtacatcttcaaaaccaaaaccatcctggtcatcatcttcaggaatatcatgggtttttttgtcctgctgctcattaatatctttctgtaaatgccatctcaaacccttattcaatacctgaaatgggaaaatgttggtagtatgtaaatgcacgagtttttgcatgttatcaaaaagaaaactgattactacatgacagggctgcaagaagacctgagagacaaaccctaagtcaaacacagtatgacctctctactctttacacacatctgtactgtaaaagtacaatattgtacttatattatttgtaatgacaaaacctagctagtacacttcaataatcaaacaatactttcccacctaccttcatattctgtagagccagtccactgggttcagtagctgtacccatatcagtttttatctttttttgctgtttagcctttattttttgctttagactcgtctcaagagaatcaagccatgtatcaggcattgccatgataatgggttgtgatcctccatcagccggatatcgggctggggctggggcccaagctgag

SEQ ID NO: 116596 - DNA, 602 bp, Volvox carteri
  Intron number 2 from transcript 118015 (locus 118015) deri ved from phytozome v7.0 (chr-ID scaffold_27; pos 948700 to 949301 reverse strand)
agtaggttggacgttggacgtagggcggtacattgccttgatatcgcccctcaaagtgccctggctgctggcatcctgactacctgacaacagcatggctcacgttcacctatcgccgcttccaggcacatcgtgaaacataatgactcgcctttggattgactcgcctttggcttgactcgccttaaccctctcctaaaacaagatgatgagaatcgagtaacttttaagaaaaaacaccaaaatattcaagaaatatatatagataatacccccactgcctctttctgttctcgtgtaaggcttcgctgctctgttactttcattgggattaatggctattaaataaacaccctacaatcaaaaagaactatcaatatttttaccagtatgatattattgtttcatgaatggatttagctttatcacctttggtttgactcgcctttggtttgactcgtctttttcttttgggcgatcacacagcgttcatttccgccacctgtcccatccagcttgaagagacacacgtccgtcccctcgcgccttctcttcccttccaagcaggtagcagctgctccgacataagcggggtaatcaac

SEQ ID NO: 116597 - DNA, 654 bp, Volvox carteri
  Intron number 3 from transcript 104691 (locus 104691) deri ved from phytozome v7.0 (chr-ID scaffold_18; pos 1135530 t o 1136183 reverse strand)
cagcaggctatcgaggtaaggacatctgttattggggttgcaaggtgaccacttggtctggtgacaacttggcaaggtgaccactacgtccactgcagtgtttatttttttggtaatatattacttttttgggaataaatgggggtctgagcctggaagaaatggaataattggccagttggccgtactggttcattacttcggctataagtcgccccaaatgccttctgcacagataaagctgaacatctggagcttatacactatttatatataaaatatttgatatcaccatgaggcggcccgctgttgcattcaacttaggttaatggggcattcgttcattcttgaccaaagcaaagggctcagaaagtccgcagacgcaatgccccaaacatttagaagaagaattagataatacagaagacaaggataggcatgtatgtttccagacgtcaggtgttgcttacagcacaccgtacagcctttgcgggggggggtcaggggggggtctggggggggcgcagccccccccagcgactatacaaaaaggaattgtaaccgcaagaaacacccagtttattactctggggtattaggctcaaaacgaaaaaaaaaacactggtccactgccttcaccgtttcctgttgtag

SEQ ID NO: 116598 - DNA, 731 bp, Volvox carteri
  Intron number 1 from transcript 119110 (locus 119110) deri ved from phytozome v7.0 (chr-ID scaffold_52; pos 846571 to 847301)
gccgaggacgagggcgtggcaagggtggttgcgaggtgaggtggtttgtttgggcaacactttttgaggcggagggaatccctgcaaacgatgcaaatattgtgttatagcaacgtcttggagctaatgcttcgagtcccaatcattatttagtggaacttaggcgccatgttccgcttgccgattgcctacaggactgctaaaaggcgccggcacgaaatcttatttagtttgccagcatctgtgttattaaccgtgtctcgcgcgtaaccgtgcagcctttttcttctcttgcccgtgattcgtccaaatattttgtctctgtctctcaaggctggttcaatttgtaactgcaccagaactcacgccccgcacttgctcatacgttccccagtttcttttaatgccaggacctttcccatatcagtcccgccgcaaggactgcccgttcgctcacccctccacagcccctcactctgaactgcataccccgtacctatacggcgtctctacccctgtttcacactttattcagctgcacacactaacgatacgcattatccccttccttctaaaataagcaacacgattttgaattccgtgcgaaagctaatcgcattccaaccatgcgaactcttcttctaacggctattttgacaccaccccgcttccgaccgactggcacgctcacgatagtgctgcgaagccatccacgccgtcgcctgctgcct

SEQ ID NO: 116599 - DNA, 1005 bp, Volvox carteri
  Intron number 1 from transcript 108365 (locus 108365) deri ved from phytozome v7.0 (chr-ID scaffold_108; pos 228141 t o 229145 reverse strand)
cgtgagttggctggccggcttgttttgttttgttttgtttcgtgtttgcctccggcggattcgggctgaaaggattgccccaaatgccggtagtgcgttagccgcaaggaagggaaggtgagggtgttttaggactgcgggtcggagtgcactgccttgtaaaggattgaatggcgactggcggggaaaccaagcgtttgttgttttgtggttatggaaaggcttcgaggtgcctgcaactttagtgagtactgttgtgcatatgcatcgctgttgaggaagtttttgtaatttttcctgatgaccacaaatgttccatactcatggccgcacataaccaggacatctcatttcaacggacagatcagctctatattagttttgtgtgaagcagggcggtaaagcttcacctgatagcctggtagtccctacgtttccaaatgcttcggggcaactgcatccctctaacccctatccctgcgaaagacttattcggattcagagcatccagtgaaatctgccggatccatgatcatcatccattgccataaacggatcaccatcatccattgccatgatgacatccacccttttcacgttcgagaaaatctttatctgttgtttgtcgaggacgatcctggaaccttccatggacaccatgccacacctccgagtatttgctgtgtctgcatccgccgcgtaccaaattttataattgattcctaattttatgcagtgacaatattatgacaagatagtaaacgctggaggtttaagcatcaagtcgtgtcgtgaacgcgcttcggaacataaccgtctacacatgtcgtgaatgtgacgccgcttcaaaaaattttgtatttgcggcttattataaaactcactttgccggacagactccatagccatcttctatattgcaaactgcataagcatctctttcgcaaatgagcaagctctccgctcccttgacctgcctcacggcaggtggtcttggaatagtct

SEQ ID NO: 116600 - DNA, 763 bp, Volvox carteri
  Intron number 4 from transcript 119256 (locus 119256) deri ved from phytozome v7.0 (chr-ID scaffold_56; pos 633076 to 633838)
tgctgctgaggtgggggtttcgttggttgggctcgttagggttttagggctgatgctcgtgatggtgggtgcaaatgacgccggagagagggtgtcctggggcggttgttcctgcgtgtgcgtcgtgcgtatttgttttatgctttatgagaggtatggatcgagcttgagagcttgttttttgaagtgtctatactttaatggttttttaaatgcacctctccgggtgagccagtggtcctgttgaaaataatttgtttttctggatttttttcttttctgtgtaatatgcgcctccgcactcctttgatggtttgttgtaatgctttaaaagttgtttttcgggccacatactgcgtttacttatattaagttgttttccttggccctttggaaaaagggttttccgcccccgaggaatatacattggtgtcctgcatgtatccctgtttgttttagtgtgtgctttcctcaccttaccccctcgacctccctgccgccttcccggtctccctcgcttcacgttctacaacatgccgtgccatcccatatgccgtacgctgtcgtaccatgctgtcgtggctctcggactgggctggacgggttcgcaaccccggggaaaccccatcgggtgtggcggcacggttttggacggggaaatggaattgggccgcgcgatgggatgggatgctgcgaccacacacgcttacacgtctacacatccgcagcggcacggtgggcgcagcgcgtacggcagggctgt

SEQ ID NO: 116601 - DNA, 911 bp, Volvox carteri
  Intron number 1 from transcript 31841 (locus 31841) derive d from phytozome v7.0 (chr-ID scaffold_40; pos 808537 to 8 09447)
ggaacttctatccgggaaccggcggtgcaagcgaggtgcgcggattccacggttttcagttccttgttgtagggttgcaagatcaagatatttgttatcgttacacacgactacgttacgtccccaaggggttttgaacattgatagatagtcgagccgagcaataagcaataactgaatcaaattaaatcgtcaaacgttggttggccccgcacaattgttcagcagtcctctacgacgacccaacctgcgcggacgaacttgaaaagtaccaaatctccaccacctacgccagcagcagctccaaaaccgtcatctgaaagcacttcgctcgtaactgcgatgatgtaaagaagcagaacaccatgattttccttgcttagctttgcacgctacaaggaaacctgcacgttttacatcaaaactgtatatttttatgtgaggaactcgtgtgaggcaatccccgtacacatatagacgtctcaaaatcatttaaacgagtcgttcgcctccatttttccgctcgaaatgttttcctttcgtacaagcgttcctttcacgcttttctcttttccctccgctttcccctcttatcgttcccgccagctctggacgctggcggttgtttctcttccttggactcttgcaccacatcattattgttgtatcaatccctcaccctcggttctcttccaacacttcctcttgcacttttccactgcattaaggtgatctcctcccgcccaaccccgttatgcgccacttaccacccacgccaaaagtcctccaacctcaaacccactccacgtccctttccccctttttgctcctggcggccctttccccctcctttcggctcccctggcgtttcttcagaccggctctggccctggtttgggtttcaccgtcaa

SEQ ID NO: 116602 - DNA, 969 bp, Volvox carteri
  Intron number 1 from transcript 107464 (locus 107464) deri ved from phytozome v7.0 (chr-ID scaffold_66; pos 752441 to 753409 reverse strand)
ctcgcacgaatagacctttttggacagtttaagtgagcagcaattcccaagatttacccctctggcgaacgggtctgctcgccaaggcctactagggaaaagcctgggtttcggttccaatcatttcgcgcagggaatagcaataaaacccgcagtggggcgttgccctccttaactccacaccgcaacccacattacaccatgcaacaacacccctctcgcaaaatggcgcaatcccgtcctgtacaagcaggaggtttacgcagatgccggaaatgctgccagcagaataacccacatcacacaccagcacctccccagggccctcacaccgccatttcgacctgtgtttctcgcacccgtgtttccctgcaccactaccattctgagtacgttgacccacaaacctaactcccataacaccgagctgcatgcagacccatatcacaaaacacacccgcgcaatacccattctgattctcagtccccatgtttccataaccttgtaaaagctttcccctaatcaaaaatccatcggatatacactaccgtacaccccgtccttgcttgtacaatcttgagactctgcagtatcgtcgcgcgcctcatatcattatcaatgcccacccttcacaactccccctaattcgcaagcacgttctataacaggggccccctttcagctcacttatcagggttctttctcttccttcactttatttaccccacgatttttactccacttcctgtactccacttcctgtactccacttcctttacccacgtctagccgcatttcgttcatacttcacatgtcaggtcgccctgtcctctcgactctgtgctttccatataatatcccctcttcaaagctcccgctgttaaggaatcccctccaaccccaacaccaccaaccccaacaccgcgaccgcaggctctccacggacgatttggtcctagggctgacgt

SEQ ID NO: 116603 - DNA, 828 bp, Volvox carteri
  Intron number 1 from transcript 94501 (locus 94501) derive d from phytozome v7.0 (chr-ID scaffold_37; pos 1256058 to 1256885)
tatagggcgggtgagcgtcgtggattgcttaaacaagctccatatggatgcatccataggacgtcggaaatgcatgaaacagccggcttccagaaatgcacggacgaacatcccggcagctgctgtgaaatggaggagcgtctagggggtaattatctttaggcctttctattaaaccttggcgcgatttatagacaattcttaacgtacgatacgatctacttctcggtcctatctattattacacggtgaccctgtatacagacagatattaaaacatttgacggacgagcgacctccgtgctcctgaatgccggcactcctgaacttggctatgcggcacctatcaacgcattgttgtgctccatttccccgcggcgttgctttctcaacccttcccagcggccgaccccatggccgctcaaccgtctatgcgatttccccaggatcaatttatcttcttttgaattccccgggcccagggaaattaaatgatgggtgtgatcacgggtggtggcacgggtgcacccgtgtaaagcgcacgtgtgcttttcatcccagtcaccttaggggtgggtcctcgaacgcaacagcccaaaccttggcaaaaattcaggtctctcttactcttttccacgaaaatttgtacctacgaaggccgggtcttatttgcttgcgaggtttctgcctggcacggattataactttccacaaaagcccgaaccggttgtttctcacttgggcgcttttttagtcggttcgtgttcgtgtacccttcccctctctacggcagcagtagccccagcagcagctgaggctagccagcac

SEQ ID NO: 116604 - DNA, 876 bp, Volvox carteri
  Intron number 1 from transcript 119030 (locus 119030) deri ved from phytozome v7.0 (chr-ID scaffold_50; pos 833328 to 834203)
ccagcgcctcagaggagagcgagcttgccaaacaggtgcgcaaaacgactcaccactttaacatgcgtcggatgcgacgggcgcccctgaccgacagtgaagccgcttatacatcatccttagcagcatccgttttctagagatcccctggcctaatacatatcaactttataagcgcatttgctcgtctctgggttttgcggaggcctcgacagggctgggccacctcaatagatgtacccgcggcccgactacgtcccgcaaggctaacccaccgacgaaaacgaaatccaaatccccttggctcccttggcttggaatccaccttgcccgcccccattccttcctccccattggaataaataacaaatatcacactcaatttcaagagggcgcacgaaagaaacccagactccccttttgggcgggagccgtttcccctttttagtcttctcttgggggggggtccactccctctccttgttgatcagcgtgacaaccggaactcaaagcaccacgaagcgcgggcggtgcttttaacgcgaaacacaccgtgttgtacaacgggttatggcaaaacacaatgcccagtggggtcgggtcgccgggggttcgcagttaaagggccatgcggcagtacggcaataattttgaagcatgcatactcagccatgcataatacgtacctgcacagaatcgcctaggtacctgcacccccatgcaaccccacgcacccctgctcaatccgctagattacctacctaggaaagcaaacacgcaagtcccgcccctttcccccccgcacaccgcctccaccccaccactcaaataacccccaacccccgcccccccaggtgctaggttccacgaaggcag

SEQ ID NO: 116605 - DNA, 464 bp, Volvox carteri
  Intron number 1 from transcript 96911 (locus 96911) derive d from phytozome v7.0 (chr-ID scaffold_56; pos 371835 to 3 72298)
ctgctggtgaaggcgaaggcgccgcggcactcaaggttcgcaacggccctggaggagtatcgaataccggatggaagacatcaaaaggatgttttgagtacgcaagcgcggataggacagttcctctttcctatctgcataagcgtatacgtaggggcgcatttactgggtttgttcgcagagaacctcgtgaaacagttacatgtaaatagttacatgtaaatatatttatgtatataaataagatgtttgcttcatttcgccttgctgtagtgcgaggaatgcggcaaatgaagtttgcctgctggtttgggcaagtggcattggtcctgccctaggtggacacattcaacgtgcatatccatatacataatcattcacaacgagagaaaaaaatcgccatgtgctctcctctgctacacatcgcagagtggcacaacaattgagactgtttttgcgcccac

SEQ ID NO: 116606 - DNA, 481 bp, Volvox carteri
  Intron number 3 from transcript 103238 (locus 103238) deri ved from phytozome v7.0 (chr-ID scaffold_4; pos 2409767 to 2410247 reverse strand)
atatcttgaagctccactggcggtacgacctgtcggtaagtaccactcggcctttagggagggcagtgctccatgccggtgccggtctttaataaaataatttcgtttgattggtggggaggctcggaagtgaaaaacaaaacaaaagcggttcttaggaggctggcggagggctgaaggggtgagaaacgctgaagagccgctgcccgcacagaactctcctgctgcgcaaacctgctgcgcaaaacgctagaagattaaagagcacacgcacagcacggtaatcagttgtgttacccactctccccctcttttgtactttctccgcgggttatcagcttcactcgtatgtggttcgtctctcccctttttacccctcgcccgcctccgagcccctgtaatttaccgccgcagcacccccccttccaacttcatccgcaccccaggccgctctccgaaaggccgatatcgtaccctctag

SEQ ID NO: 116607 - DNA, 843 bp, Volvox carteri
  Intron number 2 from transcript 83359 (locus 83359) derive d from phytozome v7.0 (chr-ID scaffold_53; pos 833222 to 8 34064 reverse strand)
gtggggaatcggcctctctcagcctcatccaggtgggcagggacatgtgggctttgcccgcaaacggcgcactgtaagcgcgtcatggcgcataaggaggccctttaggataaaagtaagaaggcatcttacgggcgaaaatctaccgcaacacgaagacctggtgtgccgctgaagcacatccatcagcatccaccggcacggtgacagtacattaagttctatctgcctcctcttgtattttttaaaagtcaagctcctttgccgttaagggacactccttgcctttcggcatcccttcgcttgcgaaacccatgaccaaccgggcgcacaagagttgcaaatcttaaccaactccatttctgctgttctccgtttcggcgtataaacccccctatttaatcaagcaaaccccttgatatcaccctactaagcgctacctctcccccatcctgtccacaatccaccgccttacaagctgacgcctctgaaccaaccttacctttcgcccgcctgaacccacctacccgcctcgctacgcctcccgaattacccctccacccatgccttcgagtcagtcccacaattcaaaacccacattctaaaaaagctcaaatcacgaagcacccttcccccttgaccagcacgacaaactaaaccaaactgcctgcaaccaagcgagcgtaagttttccccctccccgtcccccttcccaacacctattgcactttcctgcccagcctgccgccagcgacatgtatatgtcttccacaactacatgtacctaggttgtgtacccgaatgtgcatttcctcattttccttcccctccctctgcagttgt

SEQ ID NO: 116608 - DNA, 776 bp, Volvox carteri
  Intron number 1 from transcript 64696 (locus 64696) derive d from phytozome v7.0 (chr-ID scaffold_42; pos 345241 to 3 46016)
gagcggttaaacctgaggccggcggcgcttgcaaggtgcatgtgttttgtttgcctatatatctctgtctgtctgtctgtctgcctcaacacctcagcaaacgcaccggctagacagttacaggaggggattatgcaagctgccgcatgctcaagggccgttccggtctttggccacgcggtcgcaggattgatcatttcctataatctctccgagtttcatgtagtgtggttgactctcctctgcctttttaatggctaaaccaacgctaacatggcaggcacgtaagtgcctgaaaaaaatctcatgcgtctgaattaacggaatgaattgtcttagatcattttcatggctacctactaatttatttgtgttatgatatgtccttgatattcaggggtatggtacatgcactgttttgattctctcattgtctggtcttagattttggtggatcacacccagcgtgtgagaccagcgtagattttgccgcctgagccgaattcacattcgcgtcttgaaatctcggggcccgcatggctacatgattggctacatcgctcatctggacggcccaccaactgcttctaccccgcctcttacccgctgccctaccttcctcatccgaccctcccgtttctcttctcccccccttctgaaatttcccatgaaatccacggttcggaatttcacgagtctgccgcctcttactctcccgtttctcttctcccccccttctaggctgcttcgccacatcgaggcgggctacaacgaca

SEQ ID NO: 116609 - DNA, 925 bp, Volvox carteri
  Intron number 2 from transcript 88890 (locus 88890) derive d from phytozome v7.0 (chr-ID scaffold_10; pos 1477649 to 1478573)
tggagctgtaagtactcactgaagactgaacagccaaatccaaaagcctttcccttttcctttactgggtggataatgatcgatagcgggatgggatctggggccaacgggccatgagaaaaacgagtatgtgggtatcggaaggttttacatgatgtgcacacagcaacatttccatcaagggaccttagctggctccgaaagagttatgcctttcaatctcaggggtgagggaaaaaggagggggactaatagcaaaagaacaaattggtcatggatgtcgttggaggagaggcgacttgggtcaggtggcatagtgtgcatgcacgttgggatgcctcttaagaccaacctgcttgtcccacggattacgtgctcgcctgcggagtggttccttcccacaaacagcccatcttggtgtggagagcgcatattgtccacagggcgatctgggtcatagggcatttgggtgatttgggtcatgtgggtcatctggtgatctgggtccgtagggaactttggtcctgggagcgcacacgtccttcatgctgtcaggatttggccacagtctcccacccaacacagtttccagaagcaacaagccgttacctagattgttttggactcagcggcagttgtgcgtcggcattggattctttgttctgctggcatctgtttattaggcaactacggtgccagttactcggttgcttaggacttgtccagtcaatgttgctgtgagagcgtctgatattgatattgaatatttttctctctgctcacattttcctcgccccttgctcttgtgctggaatgtcggctgttggtgctttgactttcttgtcatcactgtatatgattcccacaccacgaccaccgcttatcgccagagtgtacaaggtgttcaatctcaagggggacgcca

SEQ ID NO: 116610 - DNA, 882 bp, Volvox carteri
  Intron number 1 from transcript 119517 (locus 119517) deri ved from phytozome v7.0 (chr-ID scaffold_65; pos 330491 to 331372)
acccgctgtcagcggctggcgaagcctcggacgaagtgagcagggacattggtttatagtggctcggggccagtatagtgcccctctcgttaacgcaaatgttcagggtggcacacacgcatttcgtgattaccctcaagcagcgcaacgcccttgtccatgagaattttcggcaaagcagtgttattgttcaatagcgacttgcatgcttttgtgctctgagctggaaggttgagtcggactgcttcccaatgtcatgctttgccggattggagtgccgttgccttctgccagctcccctatttggatcaggttccaaagcactcaaagcccctctaggcccctccccaatgatcgccttggtcggtccaaaaaagccttatggctccgctctctaccagtccgggggcgtatgctacctttccctacctgcaccagacaacgcgattggctgtcccagaaattttccgtttttgtaaattctgaagcaaaagaaaaaattggatagcatataaataccataccatttaagtttcccgctgagggcgatcgatcggatatacatacacacacacaacacacacacacaccccgaaatgctgcatcgctcttctccactcgctcccctcccctcctcttatccgagctaaacataatcatgatcatgaagctcagccacagaaagatgcacaccagcatgcgtattgcgtttgtttgtggttcatgttattaggattgcgcataacatgtattatttatggcgatcctttcaaatccaatgttacgacaaatgggaagtcgtaatgtattgcagttgtaaatgtaatgtaatgcaaccagtcctgctccgaaactcgcacttgcagacattcaccaccgtct

SEQ ID NO: 116611 - DNA, 561 bp, Volvox carteri
  Intron number 1 from transcript 105640 (locus 105640) deri ved from phytozome v7.0 (chr-ID scaffold_31; pos 812356 to 812916)
tgattcaacatattaatttggagcaaaataaccaagtgaggataatcaatctgtgacgtgcgatgaaaggatgaccgcatctcagcatgcagtgacgggatgttgtacgcgcggcatgcatagcatgaggaaaacaagcgggagcccaggcctaatggactgactttctttatgctgtgtcacggccttatgacgtctaacgtttcttggacaatatgggatagttccaatctttcctcagtacaaggtcaggtcttagctctaaacaaggtcttgtcttttcttagggtgtacgcctggaaaagccctttgctcatgtgcttaatgaaagcctttcccttgtgaggcactgtttggccatcttcggaggtcagctgtggggccaagggccaggcagcctcaatagaccatgcacatcaaacaggtccgattggacgcacatagcgtatgatcgtactcaaagcatttttggagctgtacgtgttataccggatgcggcggctgtcgctgtcaactgtcgttacaggtcctcattgagggctttaaaagctacaaggacca

SEQ ID NO: 116612 - DNA, 844 bp, Volvox carteri
  Intron number 1 from transcript 94881 (locus 94881) derive d from phytozome v7.0 (chr-ID scaffold_40; pos 525220 to 5 26063)
agggttagttacagggagagtgaaaaacttgcagtgtcgcattcagtcagaagtgcttgcagaagtggtttcctccggttttatgcaaggttttccaaacgattaaaagataaaaagaatctgtatacatgtatctttgcattaataacctttgagcgcgttcgaggtgttgttaacgaccgaacgaggcgacggccgttgcaaccgtcatgacgcgacctgggcgttcaagccataagaattgcagcattatcgtctgataatacatatttacttacattttagaagcttgtgcttccaagtagcatagcttagcagcaaaaacacgaagagctgcttacttgcgggtggcattggggcttacatctactctgcacaatctaaagtcactgcttacaataaaacttcaaatgttgcattgtttggcaccaagtaaaaaattgaattcctatgccctaacgccctgcaagcctgcatttgtcatttttgtgttgccgttatccgttgattcgccgtgcaacgtcgcatcaactacaattacaccatgcggaaagcggcattacttcccactttgtttacgaaaatgaagggaacgctggcttatcggcttactcggcgactgctcgctgattctgaacgccgatttgttgtccccgtgcaagcatccggaccatttccaagagcaaatagacgtgcgaagaccgtacaatttgcagcaaacagattctcacacagaaaaattgaatgcaagcaacgccacggattccctgcaagcaccgcattgtctgctgctgccgatgcgccagcagctccctcgtcgtcgtcaaaatccgacgcgtccaac

SEQ ID NO: 116613 - DNA, 828 bp, Volvox carteri
  Intron number 3 from transcript 121000 (locus 121000) deri ved from phytozome v7.0 (chr-ID scaffold_25; pos 899722 to 900549 reverse strand)
agggccgaccgcttacggagctggaggcgctgcaggtgggtccggggcggggcgggatcaggtgggggcgagtgtggtggtggtggcggtgggggtgggggtgatgcaacggacaaagagttaacttcggactttcaaagggggccccaaagggggggggttgcactttggatggaagatacatctatctgacagatcgctcagtatattttctgaagtgacgtcacacgacatcatgcggcacccagctaacgtgtacaagcggggtcacaagcggggtcacaagcgggggttagggttgtaagttacagggattttgtttagatcaggtcgaagaagggtgcaggtgtgggtgtggagggagagagggatgtcgtctcgattattggttcaatcgatacgcgcaccaacatggagttgtgaaggctttttgtttccgtttttcttctgtcgcgaaggtctccctgtccttggaagttgactctggttgactctcgtgggggggaggtttggtttcggagctgttatgccttatggccatatatgcaaggcgtttcccgccttctcctcccccccccgctttttgagcgtgatcaactcttttttgggcaaagcttcagttctttgagctacacacgaccatgacggcgcagttttttttaaacaaaagaggatgttaaaaaggagaaccctaagacctgtttccgcaggacatcagattatggatgtaagtttgctacttagactgcaggtatcgtaaaactgtttggtgcaattttctgtgttgccgcaggtggaggctgcttctagcggcgacgaggaggagga

SEQ ID NO: 116614 - DNA, 599 bp, Volvox carteri
  Intron number 3 from transcript 87913 (locus 87913) derive d from phytozome v7.0 (chr-ID scaffold_7; pos 543882 to 54 4480)
gggtacgtaatcttcaaggaaacaaagaaacaaagcatttatatatattttgttttcaatgagccgcaagccttggtaaaacgcaatgctcattcgccgccgccggcacgccgcgatcattaatcggatgcagtggaatatacgtgtgtgcatacgggtacagtgtacagcagcaccagggaggcgtcgtaaatctgctctgtattcttcctcgctcacatcggtcaactccgccatgcaatggcgtggttcctggatagacacgtcggcacgcatataggcaactcaaataggtaccccccccataacatttaaaaaacgtcgctccattccctcgcttcaattcaaacctccccggaatcggatgacgtcgcccagttgggcaatgggagggcagcccccgggggaaccacgcctcgcatgtccctctctcttccgtccctctaccccccgccttcaccttatgccacctgccacatgtctttctcttcctccttcctccttaccgcgtgtctgtgtgcgtgtgtttgcatgtctgccttcccacaaccaacatccctacagccacgactattcccgccctcctaatcaaattcaaa

SEQ ID NO: 116615 - DNA, 989 bp, Volvox carteri
  Intron number 1 from transcript 80356 (locus 80356) derive d from phytozome v7.0 (chr-ID scaffold_11; pos 1209879 to 1210867 reverse strand)
ccgccgccggtgggtccgaatgggatggtggtaaggtggggtgctggtgggttacagtgctagggtgggtgtgggatcggatgaggggtggtatgggggttggcatacagacagtgaagccgggggtccggaagaagggttgcgatgatctacactgtgcaccagcgcgctgggtcagtgtcgttttcatgtttaaaagaataaatggcttgttgtcagttgtggattgtggatgaagaaggccggtggtgatggtggtgcaggtaatgtgacccaccatcgcgcacacgtttccttcattatgcagccgatagaggtcctacctaaagcctgtcttgtataagcatacttacctggcccgcttctcgaggtggtccatatggcctcggttgtttgattggtcttcgccttgcactgtgcgagggcctttcgtagtcggcccttcgggtgtccggcatggctaaatttttgaaaggctgaggatctgcgcaacgcgcgacctcggcgcctagtatggaagtataaaatgtaaaatataacgtcttctcagagagacacaccattattaaatgtaacttttgaagtttaaggtcgtttgctattggtatcctgatgcgtagcagacaactaaatggcttatcctcgtctctgcatcatccgccattcctgctgacagcttcttggctttcgctgacaagtacccatgacaggttagccaggcgtgagcctgacgtgctccacatggttacgcattgggttggggtcacgcaaccatccccaataaaaagcatcaacatgattgtatgcctacatgcgcacctgggcacaagccttgtagagggcacaagccttgtctgtgccattaattaccgctgctagaaaggggtaattaccggcgcaactgcgttccttgctttacttttggctgctgctgcgtgtgtttgtctattacaggccccggaatccctggacggtggtgacagggtggc

SEQ ID NO: 116616 - DNA, 1002 bp, Volvox carteri
  Intron number 2 from transcript 94560 (locus 94560) derive d from phytozome v7.0 (chr-ID scaffold_38; pos 423565 to 4 24566 reverse strand)
attgctgcacccaggcggacctgaagaagctcgaggtaagtgcctgtttgcaagtattccttgcgttttgcgagcgatacggagtctgacagtaggcgagcaatgccggcaacagttaacaaagcaattgaaacacttcctgtaatcaaacgaacctgtcgcagttctagccctagttaggtcctagttaggctaatgcggtcgaagggctgcttttgctgtgtttactgtgtttgctgtgtttaaggttggagctgtcttcttacttctcgatgttcaaaatgtgggcttgcttgtctcgtgataacgcacaaacaaagcttcgtcctgaagatcccgacgagcgccaatggcacgcatacgggcctcagacaattaaatcgtagtaattccatctcgctgtaaaggtgcgaagatgcgcaaaagttggctgttaattattttccgcagtccgggcacaccctccccattcatatcacgctgcccatcatcacctcatgaagcagtgcagctttcccgaatatcgctggaaccaatttgattctagtatttcagctccgataacccggtggcgccaagacctgtttaggttttgcggatatctaaagttgtcgtgttgcaaggcttttttcgcgtttggcgtgttggctctccacggtccttgtgctaaataaaccgggacgacgtatgtaatggctccactgcaattaatgtgctgtcaggctggaatggacttacggtcaaaaggtgaattttccgtcctgcagaggggttcaacagaaagtcattaaaaccttccacgtcactggaaactgcaccggctggtattgcgtgagttgcgcgctgcggtgcgtaccgcaggcgttgagtgcggcaaggtgctcttaaacaaccccgtatcgcgccccaattttgaaggctgctcgccaacctaactctcgcccgctcatgtcctgttgcaccgcaaatctgccctgcagatcaatacatacagcagttgcg

SEQ ID NO: 116617 - DNA, 926 bp, Volvox carteri
  Intron number 3 from transcript 96752 (locus 96752) derive d from phytozome v7.0 (chr-ID scaffold_55; pos 156690 to 1 57615)
gggcggcgggaactcagcggagcaagcgacaagtggtgggtttgatgatgatcatgaattatgggacggggaagagaacggcgcggtggtgctgtggtcgggggaggatttctatgctgctgtgtgcgtttgtgtgtggggggaagggatgaggagattgcgaaactctcttagtgagcattaggcgtttcttaacggaaaaaggcatgactctccctgtgcacgcgaagtggcaggagctgatcatttggacgatttacaccaggctacggggcagggccagcagtgattcgaagataaggggaagggaaaaccgtttgccgacctgaacggatgatgggccttactagttagtagctagaagagagggggaatggggagaaatgcggttggtggttgcgacatgcgggtcccgctgttggctgcggggctattcggctctgccctaggtatgggattggcgcgatgtgggccagatattggtaggaactgtggatgggagggatggtgggttggaaggccaggcgccagggagaaatgaggagggagggcgagcgtcggctgtgttgtgcctctccctataacctgcatgtacttttttgtatgtctgtttgtatgattgcagtgtgcgacccagaagtctcgcacgtgtctgtcgattcgctcgtgcgcgtgtttttgtgtgtggttttgattatagtaggaagagaaggtatagcacctacaataaggcatgtaccgaattttatccccactgttcacctcccttaaggtccatggtctttcgttttgttacgaccgctgcaacaaacttttgactgttgacaagcttttactaaccaattgttggattaattgactgactggttggcttgctgtcgggcgccgcaggtggatctggacgggactgtggtggctgaagggga

SEQ ID NO: 116618 - DNA, 886 bp, Volvox carteri
  Intron number 1 from transcript 86098 (locus 86098) derive d from phytozome v7.0 (chr-ID scaffold_1; pos 2748628 to 2 749513)
gacctttacagcagtgtaagacaccttccgataaattaatacccagatatgaactggttactaggcatctaagaagttcctttgacgtcttcgaccacgtcgtcttgttatgacaccttttacgtacgtgcctaccgacggccggcgggccaccatagccagctctaaagtcgtcacagtaaccctcatgtggtcagttactgccttatagaacggagccgttttgatttggaggagtacatattacgtgagcttcaaaatgcgcgtaaccttccggtttccgcacattagtagatgcgtacgagcaccacaccatttcatgacaaacaacatgaggtcacgaaactaagatcctatacaagtttgcgatgattcatttttcttacataatgttgaaaggtcaccatatacctgagttcagagctcaaacaagccctaaaatcgtatgcgcacgtacctctgagatattacacgctggcgtaattaggtctgtaccatggtgccatggtccatatggtcagttcgaaatggcgatgtgcaggtatgaaccatcgccttccagtaccctgcttgtctctggaagccagaggccatgcatccgaaataatatatttcagagactataagctatttatacttcaaatttttattttatgcggctgggtacatcgccaccgtcatggcggtcctgatgcaatttcaacgagtccacggtgcttacctcgccactgcaaattatacgccgtctaagaagcaatcatgctactatggacccacattaaagtctcattttccgttcgcgtaaatgcctccttctgggtgcccaccctcatcacgactcaccttcgcaggagccgtccccgctcccagtcaagcccccagctcc

SEQ ID NO: 116619 - DNA, 885 bp, Volvox carteri
  Intron number 3 from transcript 104795 (locus 104795) deri ved from phytozome v7.0 (chr-ID scaffold_19; pos 1327052 t o 1327936 reverse strand)
ccagcgatcccttcgccgcatatcagccaccgcaggtagcttagatatgtctgggtgctcgccggggctaccagctctacttcggctggtagaaaccccccaatgtcattgttggggggagggaaaatgtctcttgggttcttttttgatcgttggttcttaacatcttgcgtatatttttcaccaaagacattccagagatgtatctttttctgtgagaggtattctactccctgacagaaaataaaaaaaattcgttcggattggggcgagggtccagcccgcttctttaccgtgtggcacgtcttcggcactcggtctccggttttgtattttattatccaaatctgcaatgaagcatgcccgctgcctaggggctcctggcgcacccacgctctacatttttgctcgcatgctgcgaagaaccccctggtgtgacaagcgctctcaatcattattgttgtcatcttttttctccctccttccattatccgtcattatctctcgtatctgcttcattcgccagtggttcgtcttatcccccatctcactatttgttcaagaattatgcacaaattgtcgcatggcataccgctattgcggcggccgaaattcattttgtggaacgccacaacaataccacgtgtgtaatgtacacacacaacgcacacacattgtccgtctctctccctcctctctacatcaccgcgaagattcctcctccacaaatcgcaactgacacataagtcacttctagttcctatttttggcgtatccgcctatccttggcatcaccttcactcgttcgtggtttgtcttccctccctccctccctccctaacacccacagcccgacagtctgaacccacccctgtcctccaccta

SEQ ID NO: 116620 - DNA, 971 bp, Volvox carteri
  Intron number 2 from transcript 92620 (locus 92620) derive d from phytozome v7.0 (chr-ID scaffold_27; pos 406725 to 4 07695 reverse strand)
tcaggtgcctgtttctgatcaaataataacccttcagcattttgtagacttgatgttatttgtagtgaggacaaataagccctccagatattcgttagcaaagtattgcaccagctgatgaataatatactgtattgcaagaaaatgaaacgagttacagggttgtaccgttgtgaaacagtaattaagaggaaagcaccgttacttcgccaactgcctaaccgttgtgggagtaggaggtgcagcgctggagtcctccaatgcagtacagcacaaataccattaaaatcttgtaatatatgttagaaaatgcgccatgctttgtactctccaccgcaaccttgaacttctgccagtccctcgggtcattccacatcacacggctttcttaatagttgcgtggtataagtgatagacgtaagtgacatatgcttcacaacctcatgaatttgaggaactgtcctgatgaggggctgacatgtgtatctaaatgtatcgcgtatctaaattttggtccgtaccagatatcgccggtgaaaaaagcacttaatgcgtttcgtccacaagtcttattcgtgaatgaacaagttctactcttacttgactgagtgaagtttgcgcgtccatctggcggttgggacaggggacgacccgctcagggacctccacgcaggctacgcctgcgcgctcatcgccttcctctcacagccgcgtcttcctgcaaagcacccagaatacagttacaatatcaaataaattggaaaagctgtggcatattttgaggactcctttgcaatctttggcggtcgagctatccccattttcttgtggcattacatctttggatcagaaatggtaatccagatcgttatacatgatatagacttctttgccagaagcgagcaaatgctcactattggacgttgtcccttgcaggccaccagtgagctgcggtcatcttcggggcagtt

SEQ ID NO: 116621 - DNA, 831 bp, Volvox carteri
  Intron number 2 from transcript 93717 (locus 93717) derive d from phytozome v7.0 (chr-ID scaffold_33; pos 682848 to 6 83678)
tggcgttacagcttgcaacagccgaggtggagcaggtgggggcggggggtgaggggggaaagggcccgggctgtgtggggggggctatgccttcagctggaatttgttagcatcgcagataaaaatattataaattctgtaaaatgtcttttgaatgtttcgttttgcgagcatgaaatagtaaatgcatgccgggtttttttaatcactgttgatttttggtggtagccatttgtatgacgaaaaagaaaatgctacagctacagctgggagcacgggtgcaagtcctgttaaataccgaacctcttaccttttctcccttcgctatgccgatggacgctgggaatttgcttttccttcttttcatcgccatacgtcattttgagtgagggcagtgagcacgctccctcaacagatgccttggtatgcatatcgcggctcagttcgaatatataatatgatgtaatgtaaagtattatgatatattgtactttattattttatattttatattttatatttatatgaaatattcatcttaaacatagttcaccggctaattctaacttgtcgctgtactacggacctcgcttcggttaccagttattcgtgcaactcttcatgttcgctattttccttcatcgcagctccgagtaacattaaaaaaccacacaagtataattattaaacacaaaaaaatgaagatcctcagcgcgcatttccgcccgcagacacgcgcagatttccgcctcgcctgatttccctgcacccgcattccaccctcacgctcctcctcacgttcggctgttctttccgcccgttggttcgcag

SEQ ID NO: 116622 - DNA, 1054 bp, Volvox carteri
  Intron number 1 from transcript 102659 (locus 102659) deri ved from phytozome v7.0 (chr-ID scaffold_1; pos 1309119 to 1310172 reverse strand)
ctacccgagggcggaaccaagggcatttttcgaaagtacacagccctatcttgtggattacgtgggataatactaaggcttgactaatatggctgctcttaatggccgtataataatttaattcaaactattcgccagtcagaaaatccggccatcggattagttgggattcaagttgttgttgatgatatgtatgacgtacggctacatacacagcaaaactgcttaggcgtggcatagtgtccacagtagattccaggattaatccagccaaggagtaggatcaaattttctatcgaccgtaaaagggtggatgcatctacacgctagtggacggtgatggacgcggctaaagtgactagcaagccattctggagcggagttgatgcagctgttcgctgctgtgtgtggttgttacagttacgctgctgatttgactgggtgctgtgtggtgggtactggacccgaaaaactcgactgattcggcaggagtgagaaggatgagggggccccgaagcatcggggaagatagggacggccagggtaatggccacaggtgaagctattttttcacaaaatcgtaccaggtcttcccagatggcatactggaacccgtcgataagtcccatgcgactccgcgttctcagctgtgaccgccctggcaggcacaaaccaaacgaagtgcttttgctaaagcgtgtgaatatcccttcttcatcatacgacaaagcaagtgcaacgctattcgttgccttcctttcttcgttcagcagcaaagaaggagcagcggctgctgcaacgctttgcaaaacattcaagatttacctgacgcctcgctgtgagcgtgcgtgatcatgggattctttctactcgttgagagcattttcttcagagttgtgaccgtccattgccgtccaaggaatgacacaacgtcatttgtaggagctggcctgctcctggccggggcttcctgtagatagtgatgcgcgcacgcgcgcgcgcctccttttcatctccagcatttgcatctccaaagcctgctcgcttcttgtct

SEQ ID NO: 116623 - DNA, 882 bp, Volvox carteri
  Intron number 1 from transcript 65045 (locus 65045) derive d from phytozome v7.0 (chr-ID scaffold_44; pos 426944 to 4 27825)
gtggacacggtacggcggaatggatggattttcaaacatacagaaataaaaaaaaatcattttcttgtttagatatctttaaagcaaatcatatacaaataaaaaggaaaacaaaatatccgcggacctgatgaagctgaacaacatttggtactttggggtgagggtcggcgcttggtgtcgtagtagtggatatattactcagcgagaagaggcccccgggtagctgttgttgttgttacagggtggtacagcttcaccagtggcctccttcccgaggtagttccctgttttactccaaattggaataaatacccccacaacagcagcagggtggtatgagagggccatcgggggaggccataacggactgccgtacactgtactgcactgcattggaaacctaggacggaaacattttgaacacactgaacagcaatacataaaaatacagctcaccacgaagctcgagatagtgtatgagattctgtatgggggggtatgattttgctgcccgccactcccgcgggtggtggtagtagcctgaagggcccccgaaaagaatgggttatcatgcttgcaagggaaagggctatccgagggcatttgggtttttaaacccgcacgaccctacacggtcgtacgacacgacacgtgccgtgataagtaggttgcgtcattgcgtctcttttcttgtcttgtcgttatttcatcaccaacgcccccccgccccccgaaattccccacaaatccaaagggttcaagctggtgactgtgtgtaccgagcaaaatttggttttagagttgagtttctaaccgccaaccgccaactaactgactccgacagggccgttacattcacgagtccactcgcagcctgcc

SEQ ID NO: 116624 - DNA, 437 bp, Volvox carteri
  Intron number 1 from transcript 67897 (locus 67897) derive d from phytozome v7.0 (chr-ID scaffold_69; pos 350413 to 3 50849 reverse strand)
ttggtgagcttcgcgattgggaagttagccaaggatgccaacgagaagcgataagaagaatctaatgtacatttgtgtaaatagtattgagaacgttgtcgcttatgctgtcatgaaaaggccggcttgcacagtttaggcacacgactgccagtccgggcgtcctttaaccttctttttccacaacgcgcccggtgattccaggcgcatttgatttaaatgctttgagcaagaaattatcaccttgtttaggttgaattacactaatcgcatctaacataacagctagtttcaataataccttacgatgtagttttgtttttgcgcaccacaccaaactgcccgatggctgttgctttattatcctgagatatattctcgcttatgattgcgcccttgcagtgcctacctgcaagccttccctcaagcgcgtcacc

SEQ ID NO: 116625 - DNA, 527 bp, Volvox carteri
  Intron number 1 from transcript 105555 (locus 105555) deri ved from phytozome v7.0 (chr-ID scaffold_30; pos 425558 to 426084)
acgcttgtaagcgtaaaccgcagcacaaaattggtgttcggtgtttgccatttaaacggtaccagcataatacgtggacatctgatgagctgatttaaaagataacttccttccctagttaatgggacgagacttggctggagaagcacatgagttcttacgacagcttgatgaaagactccaagtggcacacaattggcggtcatactgtttagaggcagacatgacggttaaacttttaacgtttctaggacataggtggagttgaaatttttttatcgtaagcagggggaagtgttacagtagtacggaaaaaaacggaagttattagcatcgcaagacagagcgaaagcaaagcaagcaactcattttgcatactcggtaatagatcaaatttgtatcggttatcgagtagcctttcctcttctgcccgttatttccagcagtccagtgttgcaatgccgcccctttacacgcctaaacgacgcgcaggccgtggcatctgccagtcaccgatccttctagca

SEQ ID NO: 116626 - DNA, 750 bp, Volvox carteri
  Intron number 1 from transcript 98149 (locus 98149) derive d from phytozome v7.0 (chr-ID scaffold_68; pos 613332 to 6 14081 reverse strand)
tggagaggtttgtcaaggtgcgcgatagaacttagaagtacggcagcaaaagtacggcagcaaaatctcttacctgtggatatcaaggtagaaacgcacacataaacccacttcaaaaggaataccagagaacgaagtttggggggtttggaggagcttgggctccgaccagccgtcggatccgtacatctttcccaaacgcttcccggggggtctgggagtgtttttcccgcccacccgcccacccgcccttcagcagttgggcagttggtacggcagagtttgattcattgagtcttttaaattattatccccgcaatttcgtctataacagatgcctttgctgccctgaaccggaccggtgcaggagggtcgatatccgccaggatgtgtcttttgcgactcgtcgtcatgttcgtaccctgccgtacgctgccgtaccctgcaatgcccggaaacacctcttttctacgctctcctccttttctttcggatcaaccaccacgccttttttgtatccccttatccccttttctccctctggactatccgtctacccctggaatcagcttcactcgccttccaatggttcgtcttaccgtactttttgtgttcacgactccctcctctccctcctatcctcctctccctcctatccgtgctgcttctcgtacatcatccttttcctgtcttcctatctccatcctgtcgccaggatatcgtcaaggcgcgctccgcagacaccgttgt

SEQ ID NO: 116627 - DNA, 854 bp, Volvox carteri
  Intron number 2 from transcript 106985 (locus 106985) deri ved from phytozome v7.0 (chr-ID scaffold_55; pos 769243 to 770096 reverse strand)
tgagccttaaggtcaacacggtgggcttctatcaggtacgcacgccttcaggctttcccaacgcccgtcgttttttaatcttctatattggctggtttgctgcctgcatttgatttcatctgttccagagtatgtggtgctgcgctctgcagcaggcttgctcgtgccctgactgtgactgttccggacttacgacagcagggtgggggctcagcaccttttgacctttattcaagcggtgcctgtcgccgcttaaggacagctcagctcactgtagtgctggttgcctgcttgctgctgctactgctgctgctgctggttgctgatagctcgctggttgctgatagctcgctggttgctaatagctcgctggttactgatagctcgccgggtatcgcgctgcccgagtgcttttcattgctggatcgcattggcagttacagaacagccaggacagggtcgtgagttgtgtgttttgattttatttgacacgtgcacctgtatgtatatatgatgtgtgaaacagggggtgtatcttcgcccgtggcagctaccctgcgaaaccctgccttccccggtatttcggggcaccctcatccagtcaccctagtcaacttctcagtggatcgctcaggttccgcacccaccaccagcatccaacggaatctgccgggtcgacagcggcccaactccattcctggtcggctcgcaggttaactttatcccaggtcaccaccgtccatcaactaggggcgcaatgcctatatatgtatgctcatgcatgctgtttgcatggtttatatcctggtcatcctgctgaagctgctactgctgttgctggcctgatgcaggtc

SEQ ID NO: 116628 - DNA, 694 bp, Volvox carteri
  Intron number 2 from transcript 95417 (locus 95417) derive d from phytozome v7.0 (chr-ID scaffold_43; pos 1137479 to 1138172 reverse strand)
actagccctgcttcgtgcagtgcccccgcttcgaggtaaggcttagacgttgcaatcgagctcgacgctatatgtgtttcgttttgcggttgtgtttgagtctctgcgcttcgtgcagtgctcgtgcttcgaggtgagacttagatgttgtagccgggctccttgcgagccgtgcttcgttgtgcgtttgcgttcgcggctgtgcctctgtcttgaagtgtctgtaatataatctcgccttgtacacatttgatgcattggcttggccgactaccggctgtgtgattcgactgtcgcgtttggtcgttgtggacttcatgcgtgaacggcgcggcctgctctgcactgaaatgtggtggacgtcttagatgtcgttcatttgctgtttgtgccgcttggatccggtacttccgttctgctccctttatacgaatcttgtactgctcgacccgccaatatagtcttctttacgtgagcgcaaattgctctgctagcacaacttaaatacctacatctttctctgtccgtccgtctgtgaataaaaatatcctatttcggcgctattgctagcgtgtatatgtcttatacgttttctgtcttgtagctttacttcaagctcgtacctttaatgtcgcccatccgatgtacgaccccgacagtatctcggtaagcttccagcttacctttacggccg

SEQ ID NO: 116629 - DNA, 890 bp, Volvox carteri
  Intron number 3 from transcript 105485 (locus 105485) deri ved from phytozome v7.0 (chr-ID scaffold_29; pos 601116 to 602005)
ctacaagtgggtgaccggggtgctagtgcttgcatatttgtcgtgcagtttgattagaatgcaggtgcttcattccaaacaggtgaagcgactcagaaagcttactgtttgtgcttcttgctacaactgccgacgtgcacattgagcagaccgctagcatccatctggtagcttgtgtgcatgcccgcttttcacccatcctcttggagcggttgcgaaagtgttaagacttctagcgggtggcaggtagggtggccggacggcaattgtgctgaggaagcttaaaactgcgattaggtaggaaactccatttgttttatgccagcgacgagatgactggtggctagggcatacaggggcaaaggactacagtagaggaaatgagatcctatatacagcgacacggccttggccaacagtgttcttgttgtgcacgtaaatggaattatacacagcgagaatcatgattcggagcttacgtcagatgtcaaggccgggcagagatgagctgggcgtggtttccaaggggcctaggccgtcaataggcccaggccacgatctgaactgtcgttcccttttcctttaaaacccatgggccactgttccttccctggctccatccgatgccgttgaagtccccctcctgggccttcgggtctgtttccagctcgcgtcatgatttcgtcttgatttctggctcttccaaggcacaaatgcagatcagagaactaaatcttatgcatttggcatgccatctggtcctgggttgatgtgcaatttgctgttgaccttgttctggtgactcgtaaattccctttatcctctacaatttgcttgtgctcctgtgcccgtaaggtcaactcgctgccgtgcgtcgtccgcatcccgcc

SEQ ID NO: 116630 - DNA, 561 bp, Volvox carteri
  Intron number 2 from transcript 95837 (locus 95837) derive d from phytozome v7.0 (chr-ID scaffold_47; pos 545566 to 5 46126 reverse strand)
acacgtgagtctattcacctcatgtgggtttagcggttgactacctgggtgggtggacggagcgggtagggagttggttggggagcggtttagttggttggggcgatttatctttttcagcctctgggggacaatgcccctaaggacggcacccggggcaaaagcgggtattagtcctttgtgtttcttccatgtcttaaatttagcgggaataatcaagcaacttgtgcttgtatttgtgcgtattagtgtgtgtgtgtgtgtgtgtgtgccagtgtcctctattctaccgcgcgtccactctcagagggctgcttatgtcttgttcaacatttccatcccctcttaatgtgtattttatatgtacataaatctacatgaaatgtttttatgcaaaatatatatcaaaaaatgcatcaaaaaagaataaataaagaatggatatagttagtgctgttgcagtaaatccaaaagcattgtccgcatgtaaatggacaaaggcaatatattttgcctctttacgcaggtccttagagaataagtgggacacgggggttcccc

SEQ ID NO: 116631 - DNA, 569 bp, Volvox carteri
  Intron number 2 from transcript 100452 (locus 100452) deri ved from phytozome v7.0 (chr-ID scaffold_119; pos 106237 t o 106805 reverse strand)
gaacgcagccctcatccagagtgagttggttggcagttggaggttggctgccggttatatgctgactatgctttcatgcgctttcatcaggtgaagtccatcctcccctctgtatgtcccccactactatttactcttagaaaatgagaaggaataaggccatggttatatccttaaaagatcaaaatcttctttatattcggtgtaaactaagggataaaaattatacttgatagctctcccgctgagtaaattggttccctgctgcttcagttttctagcacttaatccacataaaataaatgttgtttctgtattttcaataagccaatggatactgcacttacaaaaaatgtgctagaataaatgtacgacaattacgtacaataacccgggcgtgtctaataccagatgtgtgtgtgctcgtcccggttttcctatgttttcatttccctgctttccctgtacaacggccgtaccgtacggcaggaagctgcctgccgggctcgttgtacaatgcctcctcctccacagttgctcgtccacctcagattcctgggcagcagctc

SEQ ID NO: 116632 - DNA, 813 bp, Volvox carteri
  Intron number 2 from transcript 107002 (locus 107002) deri ved from phytozome v7.0 (chr-ID scaffold_56; pos 176522 to 177334)
gggtcaggtgtgaggtggttgaaatcgggcggaaagggcttcaatgaagagaaatagctatatgtaatgacagagtccgtcctaattacccaccaataaatcttactagttaaattaaagaaaaattaatccctccactaattatctaatatacttgttatcccgggatcgagacctgtcagggtcgaaaatcgttccgatggtggaaggtaaagtgcccctagatgatggacggtggtgacctgggataaagttgacctgcgagctgaccaggaatggagctgagccgccgtcgatcccgttggatgctggtggtgggtgcggaacctgagcgatccactgagaagttgactagggtgactagatgagggtgccccgaaataccggagaaggcagggcttcgcagggtaggggccacggatgaacatatacccccctgtcccacacatcatactgattgcgaaataataatccttgttttctactaggatatactacaaagacaataaacagaaagacagcgcgtccttgacaactcaagctaatttacgtaacacatacaaaaatgcttaggtaggtaatataatcttttccaacttaaccccttaaccggtttttagctcaatgagtacgtaacaactgagaaatagagaagatcgttattaaagtaaataattttcaaacatcacaggagtaactgctaaatcttttgtttcctttaaaacttcttttccactttttgaattactgagcgaaatctccctcacttttcctcccttgcctgccttgttaaggcggttgactccgtttgca

SEQ ID NO: 116633 - DNA, 794 bp, Volvox carteri
  Intron number 1 from transcript 89736 (locus 89736) derive d from phytozome v7.0 (chr-ID scaffold_14; pos 247811 to 2 48604 reverse strand)
atcagctttctgcgcggtcacgaggtgggttttagctaatctctgcactttttgtttatttggttttccgtcagaggtataagctctttcccaaatgcgcaggataactggaagtgcccttcgcaagggcttcttacgaaactcattatcaatcagcatctgtctatcctgcgtggcaagaataacgagaagaaaagtcagcttcttatgcacctggcagaagatgccggagcccactggcctgaactgcaagctggcggcgtcaccgcctccatctgcgcatcttttacaaccgactgtgccaaagtaagtgttagcttttttgaatatttttggaaacttaccggaatttattttgctggctgtcgtagtgagttttatccgccccgaaatgttccgcagtgatcgttccgtgatgaaggcgctgcaattttagcgatgagctgcatgagctgagtaatatccgacactgaaacccgaagtctcgttgctccttgcaacgacatggatgctgttgtgacccttcgaattcttggcactaccttgtccggaacttagaagacgcgcacatcctgcttgctcgggcataactttccccgccctacccttctatattggcatctttacccggaaagcagccgatactgcgtggcgcctttcctaaaccttccttagggttttagggctgggttttatccgcctgcagccccccagccttgcccttgccatcccgtttcccgattccttcccgtttctaatgatactctaaaccacaggttcaggaggcggcggct

SEQ ID NO: 116634 - DNA, 477 bp, Volvox carteri
  Intron number 3 from transcript 118201 (locus 118201) deri ved from phytozome v7.0 (chr-ID scaffold_33; pos 252174 to 252650)
ggggttcctgctggccagcgcgcacctcgagatcggtacgacacttacgaatgcccaacagaaaccaaccgaaatgcgtgcttcctgcacaaaaaggactttttgatttggtacggtgatggtcacgtggcaccgcaacgaacacacataactgaattattcgttcgtagattgcagctcttttgaacatgaacccacaagcaccatcgcttaagactcgcattccctcctaatctgcagctctcctattgctacggcccttatgatgttaggaatgcacatctttttcaatttacattctcctcattcgccgtttcccgcctttccgactacttcttcggacgttaatgcacatcattttttcttttgcaatttacatgtacggctaccccgctcgtccacatgatgctatctctgcaaattgccctaacaatcaacaaccaacaaccgacattttcaggcaggctactgggccgc

SEQ ID NO: 116635 - DNA, 1014 bp, Volvox carteri
  Intron number 2 from transcript 119430 (locus 119430) deri ved from phytozome v7.0 (chr-ID scaffold_62; pos 463414 to 464427 reverse strand)
cgcgcttccagacagccgtggagcagctgggcgaggtgcggtgtactccctccgggtttaacaacggataaacaaaaaaacgacccagatacgactcgaacgcgatcacgaacaaccaggaggcgtactgtcaggggtgcgcggtggcggtggcggtggctgtaactgcttgcatgtcgccatttgggtgtctctctggggccgggggcgggggccgccgctccccattgggacgggggactgactgcggtgtgcgccgtggacgaccttccaaacccgtggccaggggtcaggggtgcaccgagacaacgacatgatgtatgtattgcgggtatcgggggggggcccggcgttgttctatcgggggggttttggttggagcacttttgcttgagttgacctgaaacgatgatggaaatcgtgaagctgccctacagccccttataatgatgacagcggtgaaaagggacatacaaccgaaggggaaccaaaggggaaaccaaaaacgttccaccataaattattggtttaaaaaagctttaagccaccagggagggtgagaggttactgaaagtctttttgctgtctcgaggactattccccgatcatctatcacacatcatcgggacaagcacatatgtcgcatccattccgagcgccgcgcagcacgctgctaccctattgggcttccgtcggccctgcaggccctcttaacctgtcgagggctgcagtagctgagtgaagaaaggggctccaaacatcaccccacacccaaaactgacccaaatcaaacggacactaaaccgcattaaatataaagtagcattatggcggcagaagaggaccagagcccttcgttcccccggcaatatacgcctcgagaaaccttccgccgtacaagccctgtaatccggtgtattgctaaattccttgcgccccacgccaccatcaccaccaccaccaccttggcctttgccaggtgccctactcctgggcctattgcagcaccggcag

SEQ ID NO: 116636 - DNA, 729 bp, Volvox carteri
  Intron number 1 from transcript 96929 (locus 96929) derive d from phytozome v7.0 (chr-ID scaffold_56; pos 529865 to 5 30593 reverse strand)
aaattgagcgctcaaacatcaccaaagctctccaggtaaacgaaaatgtacatttggcactgcaaatgcacagcaaacggatcatcgatcttggaaccgcaggcgggaagcgtgaagctctgctatgcttcctacactttggccggttctgatggaaatggagataaggagaaccaggcatgtagcaatcaaactgatttgcctgcagcaataacgaaagtgtagctgctgtcatgtatgttttttttctcgttgtttcccgttctgctttagtacctcaaagcagcattaaaaacaatccttatacaaggacagcagtttctgccacgcatgctttccgtttgagcatttcctaaaatttggttcagacgtatcgcatcatttcgcatcgctgtgcgtacgggtagggccggtctgtattatttgaccttaaatctgcattcacgacaattaacacgtacttttcctgtgctgtcaaaactgtaaggaaaacaaatgaaacgttaagccaacattgattacaacgtacaattagcgctatagcaaccgatctacttgcgtatgcttcctcagtccgtcttcgtcgcatagtcgcagcggttgctgtgtgcctttttggacgccctgcaggccacagtagaacaccaaaaatagttcgcaactcccctttcccctatccacacgcgcgtttcaggattgtttggccgtggaggttttgcgacacgagag

SEQ ID NO: 116637 - DNA, 615 bp, Volvox carteri
  Intron number 1 from transcript 89754 (locus 89754) derive d from phytozome v7.0 (chr-ID scaffold_14; pos 491505 to 4 92119 reverse strand)
cctgttacggtctgtcagtcgaaaggtgagaacgccttgtacttttcttccgcttctcgtatcttggatcactctacagacccctgtttcttagcatacataagcagtgtgatgaaaagcccaacacctcgaatgatggttaacgtcgtgttaggataacctacttaggttgcctaggtcatgccgaacagattaggaagagcgtcttcggctcatgctgctggctttgcatgtcgtcctggactgttgaagtctgatgatgactctgcgaacgatgtattgtacggcatgctttgatgcttgtcgagtcgcccacaaaaagtctacctcccagtaataatttgtgcctaatgcagcaggccagaatgttgggatttcgtcgcatttttacatgttagctatgcgcatccattagttgaggtgttgcgagatgcgctttaggatgaggtctgtcgctgtaatcttggtatctttattagcatttatattttacatggttttggaaattagtaggtaagacggggcagctttgcactgaaagctctttgctagaggacttcacctatccggatttctgcagaccggacctcctgcttgttggaacggtcacaatag

SEQ ID NO: 116638 - DNA, 760 bp, Volvox carteri
  Intron number 2 from transcript 119509 (locus 119509) deri ved from phytozome v7.0 (chr-ID scaffold_65; pos 139093 to 139852)
cagcggagctctggaggaactgcgtggtgcggggggtgcgtgtgtgtgtgtgtgtggacgaaaaggccgggggggaagagggggagagccgctctagccgtgtgtgtgtgtgtgtgtttaataatcctcggagccgcgatgaggggaaaacggcgatggtggtacactgccgaataactccgtaccaaagcgacagctccgaagtactacagcgacatgtggtgtgtgtgtgtatgtatgtgtgtatataggttggaagtcaggttttgttcaaatagatgctaagaaatgcagagaaggatctccttgttagcattgggagcgccgagtcgtgtgggagctgcgtatcggcgcagcttgcgtttggattgttgtatgacaacgtctggcatgacgtcagacggacgccgcactcactcagtagtgctgcgatgcgccacgcgacgatgcagcgcaacgcatcagttgaatcaaaggaagagttatgcccagcttggctaatttgcaaaaggaattgttcttaattaatctgcaaggaaagctaatttgcaaaatagaaaatgcgcaaatcttgttggtttgtggagtgcacagtaatattccacgggcaaggtcttccccggctcgaggcgaccggcacacaagcacacgccctgccctaccccgtttgcccagccgccacaacacctctcctcgtgcacatcacaccccacgccgtccggcaggtagcgagcttcctgcgggccgagctgtacgacgc

SEQ ID NO: 116639 - DNA, 767 bp, Volvox carteri
  Intron number 1 from transcript 108435 (locus 108435) deri ved from phytozome v7.0 (chr-ID scaffold_117; pos 19734 to 20500)
gccctgcccaagggcaaattcaacctcttttgtatgtaaggaattctgcaaaggatttaaactactctttgttgtgagtgggcggacgggtgcgatcgagacggtgctggcagaactagccgaggcgactttgatattggcagctacggcaaggaagttctggctctcggttgtccccatccttgccatggaactagtgctgagcctttacagcaattctactactccgcaagaacacagcacgcacagcaggcttagcagcgacagctgcaagcaagaacaggcatcctacacacttagtgctaagaggacattttcagtatttactttctgtgcgtatatctatgcgatagttaacttcatcaaagcatctgtaatcatagctttgcgcaacgatatgctttagaccaatataactagatgcagataaaaagaacacatcgccttgatggaacacgaggccgaggtgtatagaagagaccatctgcaccgcgggagagatgcaaggcgcgcaaaacatttttgtgcgaccctacttgttggaagcatgaaacattttaccaatatttcgttttacgtaacgttcaggtccaacaagagaagtcgaagccgcagctctcagcgcgctcgtgttaggagcgtgttacgtttattattgctcaattccgatgattccgagggagagaaaggtagacaatatttataaataaaacaatacaaaatcctcgattgattgttccttgataacccgtcgacacgcacaggtg

SEQ ID NO: 116640 - DNA, 540 bp, Volvox carteri
  Intron number 1 from transcript 121694 (locus 121694) deri ved from phytozome v7.0 (chr-ID scaffold_88; pos 62038 to 62577 reverse strand)
tgacggaactgacgctgctgcaggtgcgtgtaggcgtccgcaacatctaccggctggccgaaagtttcgtggttggttagttggttggagaaacgccttgcttttgttaggtctttttttgatatacatcaaacggcgtgggtagcggaagggaaggtcttaactcttagaggctcaataaagcgttaagacctaggctaaattcgtgacaggtgaatttaaagtaaaaaaagggacaggaagagagatacccctataaaggaagagaggttatgatattgtgaacacctgcaattcaaaaacttaacaacctcttaagcctctgctgtctccccgacccccagccctcttgctgtcttgcccccgcccttgtcccagaccaagtataaatcttaatgcaggttaccctctttccatgctcgcacctacctctattcacttttccaacccagctcctcagcttgacccgggccgaccacgtcctcttcctcttcttccccaacaggcaaaggagcaacccggggatagcaaagtcctggc

SEQ ID NO: 116641 - DNA, 993 bp, Volvox carteri
  Intron number 1 from transcript 96767 (locus 96767) derive d from phytozome v7.0 (chr-ID scaffold_55; pos 254671 to 2 55663 reverse strand)
tgccccgctcggctgacgacattgtgaagcagcaggtaggtgcgaaattgcggatgaggtggtcgctgaagggcgtctcttcgcgctaaaatcgaccaactttggggttgagaggtcgttacggctaaaacttgtgcgctagcacgcacgctggcacgtggcctcaagccttggcccgtccgaagtaccgcggtaccaaaccttggcagcagcgtggctatcttcaagggcagaactattttttgaaaacacttttgatatcttggttttcttttgggtttcgagtcttctgcctccttatcttagaagggtttttaatgatttcatgggtacgatgcatgtatgtgaaatggcaattcaatatttgccacagactcttcatcagatttactgcgaaattttgagtcaacattacaattttttcccaattcctcaaccgaggtaataattgcgcgaagttccgactgcgcggggccgaccggggagacagtagcagcggagggccatttcccccccttggaggatgtccacgctgattggaagcatcttcacaactaccaggaggagcacttccgtttcaaaaaagcattgcaatcgaacccgctgcttgtgtgcatagctcagttggggagttgggggaccagcagcctgtcgtaactaccatatgatgctggacagcctctcttcgccatccctgccaacgccatacttgtacagcagtcaacagctgcagcagtcaacgtggctgagggccctgcgcgcagagagccatgcttttcaaatattttccacatgaatatatttttcctttttttaatcatcgcgaagtgacacgaactgcaccactacggcatgaagcgatacaccagcaccagagaaacagcttcatgtatcggccctgcagccgcaaacacatcctgcattagcacccaccctgccccttgattggttgctgcagctacccctcgcaacggttctgctcgtccatctgta

SEQ ID NO: 116642 - DNA, 1004 bp, Volvox carteri
  Intron number 1 from transcript 94905 (locus 94905) derive d from phytozome v7.0 (chr-ID scaffold_40; pos 721620 to 7 22623)
gacggcgtcggactgagctccaggtgcgcataacaacagcacgcaacatgcatgctgaggtcagagcccgcacgccagctcaaagccaagcccttcaagccatctttcaccacgcagcatgtcatacaattacctttgaggttttgtaagctacacatacatcccgctgggaagcgcgggaaagacggtgtcacctacgacagacgggacgacattatacagctttctgaagatttgcgccccgcggcctcatgccacttggacgcccaatcttctgtctctattgcatgtctcagacctcaacctcgcagaccgccgcccgtcctcaccagcagccgacgctgtacaccagtcgcaaacatgccgtacagcggcacacagcacgccaagctgtcccagcctcccccccagctaccccatccccacacagcccaacatctcgcaccttccccggctgtccgccaagcaccgcgtggcatcgcccgcaacaccaggagaggccgcagcgtttcaacctctcatcatccatgccacgcacgcatgcactctccgatggccccttcttttcttccccgcaatgccacatggcgccccctcgcaatctccaacacaagcgaatctcatctacctctacctccaccaaccctcccttaaaaactacaactgcatttttttcctaacactttgaaaaaaacccacatcgccgatccctttccccatcccaaccccccacacccattcgcacatggacaccacagtgttgattttcgagaaaaaccctgccaccatagtgtttggaataatagctggaggcttttgactggttttgcttttgaatatttgcatcgacatttttatttgcatcttgcctgtggtgcaatttcccaaacccgccgcgggtctcacgtccccgcttttcccccttttaatcattcacgtccacacacatgttacatacatacatacatacatacacaggcacagcgcctacgtgggccatccag

SEQ ID NO: 116643 - DNA, 532 bp, Volvox carteri
  Intron number 1 from transcript 90359 (locus 90359) derive d from phytozome v7.0 (chr-ID scaffold_16; pos 1449619 to 1450150 reverse strand)
gcggttacacttcgggttttacgacgggtgggttttagggttttcagatgggtttcatgcagtttgtagattaagtgcgtgggtaaataaggccaggtggctgagtttgattaattcaaatcttggtggtgttcggtcgatctctgatggcctttttgtctttcgagggcctgagtgaggctttgggatttggggagggcgagaggagaatgtatgccaacaccctggtcgaaacagatgcatgagaagataagggcatggatctaggaacttaaggttacagggttctaaggattggattattttggacgaccacagatgtgccgtagggatagttagttaaattagttggacgagtggcagtcaaacatacagtgtgaagggaaacggtcgcatgaaaagagagaaatttgtacgaccatgtttcttttttgttgtgtttctcttaattaggaaaccctgaaagaatcgttatgaaactcgcccaagcgcctcaggtgacgaaagcggggaggatctatttgacggggat

SEQ ID NO: 116644 - DNA, 992 bp, Volvox carteri
  Intron number 1 from transcript 107816 (locus 107816) deri ved from phytozome v7.0 (chr-ID scaffold_79; pos 401641 to 402632 reverse strand)
tggcggtccttccaggatacgctgtacactggcaggtaaccgggacgaggagtaggtggtggagccgggtataaaaatccactcgttcgtttgcactgcgcaaaaacttctgcatcccttgtgtttcgcttcaggccgcacacggccgcaatgctggctggcgcccggcaaattggcccgctcccatgtaacgtgtctatataaatgcaatggcaaacatatacatgtatatacatacagacaaaacgcatacagacgaacatacagatgtacgtgcagtatgttgaaatttggtaggcaagcagggtgtcgtacgatctcttctttttgtagggcaagaggcaatgcatggcaatacacactcgggcgggggatagcgacgtctccgcgtgatggtgccaggtgcacaggaaataggacagaacgggtctgagttgcccatccacacggttagtggtgtcgtacagaggcacttagagccggctgccgccgctttttttctgctcgttcgtgcgtggccctccacacgtacatggcttctcccacacatatcttcccaagcctgccgggagggactggctgcacagcgcatcctgtccgtagcgccacgtaagataacagctagctctggacgaggtagcgctgtaaacctcaaaagccgcgagaccaaggaaaaaaggaaagaaagaaacccttctgatttttgttagtagcggacctgaggggcacatcccttactgtacattaaggccgctgattgcaaagccctcttgcaaaacagttaagtgttgaggaagtgtcatgttcaaggaagggctgcttgaacaaaatgtgacctttctttttattacattcaaatttaccttcctcggtatcaccacgtgtatgtgtatgtatgtgtgtgtgtgtgtgtgtgtgtgtgtgtgccacacgcgtctctcgcttcctgcgtggcagacgtaccagcagctggaagccgaggcttccctgga

SEQ ID NO: 116645 - DNA, 860 bp, Volvox carteri
  Intron number 1 from transcript 83109 (locus 83109) derive d from phytozome v7.0 (chr-ID scaffold_49; pos 692437 to 6 93296)
ttacaagtagctgtgagtattgcttctttacttgtggcatgggggttgaacttattcgcgaattcaaacaattgtacaccaacagaccgtttggggacggggcaattgcagactgctgcacggcacccatgccgtacggctatgcaaacacggcaattatatgcacgtgcgtgcatgtccgtgatttaaaaagaaaagctttgtcttgccttaatcccggcattcatcgtcggtgcaagccccaccgccgtagggttgtagatcagtcaagggtttggcaaagttgttgttgcccgcgtcacacacacacacacacacacacacacacacacgtgaaccctcaccccaagagccggatcgggccggggctgaggaggagttttgtttcatgtttcagatgctcagtgcacaaactcgcgcgacggagccttgactcgtgagctagcacacgtgctagctgcttaaggggggacagaggccccacgcgcccctctcccgtccggggaagaaccaacttctccgggagagagcttaggcggtctttccgttggggctgggcagcagcccctctgtggccagtgtcgtcaggcccggtcagatagatacttgtaaccttcattttcacacagacatgcacacacacgaggcacacggggtacctgcgtaaattggtctggtggggccaacggagaaaagggccgaggcatgtgcacaaaactaagctgacgtctatcgctccaaccaggcttagaacattcaacgatatgtcttttacctcctttcccccttttgccccccccctctcctctcttttcccctcccgcctcgcttcgtcccattcctggacgtcaccaaggtgg

SEQ ID NO: 116646 - DNA, 686 bp, Volvox carteri
  Intron number 1 from transcript 71000 (locus 71000) derive d from phytozome v7.0 (chr-ID scaffold_226; pos 30898 to 3 1583)
ttgcgtggcgtgtcaggtgtagcgcgtcccggcaggtaaagcctcattcgtacattccgtttcagttgttcggtttcggttggtcttgggtgcgcgcatcctaactatgcgtgtctcaaccaatacccgcatgcccacacgagaatgctaagaacaacatcgatgataacatgccggtgatgccggtgatgatatcctctcaccttcctgtgttccgcctgcagccacaaactcacactccgcattatacacggccgacccccaacacccctgcatgagccgagtcctgtctcgtcctgtctcgtcctgtctcgtcctttccgcgtcgtccatctcgtctcgggattcccctaatgcatgcgtccgttgcgccctcaacctcgtccccctgtgcatagagtccccctccagcacactaacgtatcattttggtgtgatgatataccaaatcacaccaggagcatatctgcgactgtggctgctgccaacataatgttttagttgacgtttcgactcaacatcagcaccaacgcgccatcgctggctcgcacgtgcttgaacctttaaaccatactgaaaatcaaaccttgcacgaaaagcaatcttttgaaatctctatgtaccatggtaaccacgtgaatccacaaaacacgtgtgtacccctatcgtacaggctcgtgggcctt

SEQ ID NO: 116647 - DNA, 426 bp, Volvox carteri
  Intron number 2 from transcript 103383 (locus 103383) deri ved from phytozome v7.0 (chr-ID scaffold_5; pos 2408458 to 2408883 reverse strand)
ctaaagccgattcgagaccttaccgaggtaagttttttcgttaagacgggcaaaagaagagatgcagatgcacgtatgaaccttcgaaaggccgcccgattcttttgcaggactcgcggccaagatataaagcacttgaggtaaatgcataggtaaatgagccaggtctgtctcttctgcgtgctgaaagcagccatttcgtaccgtgtgggcgcttgggctagaattattttcctatattttcagcccgctttgacatcatttctatctgtacttgagatttttagatttgattccaactgccacacttcttttgcgtagctgcggttaccccgagagcgtcccttgccttgacattcattattccctggtccgtcgacccatcgcgcagggagaagctgcggtttcccggcaattagcctccca

SEQ ID NO: 116648 - DNA, 1017 bp, Volvox carteri
  Intron number 1 from transcript 89227 (locus 89227) derive d from phytozome v7.0 (chr-ID scaffold_11; pos 2095502 to 2096518 reverse strand)
tttggattccacagcgacggcttccacgcgcttgggtgagtgccatcgagcgtccgaatcgaaggagttgggtcaaacacgggaaccccttgaccaccatattccttaatgaatccttccactttacctgtcggcttcctccctgcgaacgttttcacggcggcatgcaccaaaacttttccgctataattagtttgttgacgtagatccgtatgctgtacgagatccgcgcaacgccgccggcatgcacgcactctacctgacgtcccccatctctacaggacttctacaggactgccttttgagccacgtgactttccattcaattaaataaccaaaacacaagatgacttagggtttagggatggttttgcgtgctgctgggcacgcctcggggtaaaacacgcaggcgacacgggtgcatgtcaaaccgacccgtgggtcacacgtgagaatcttgacgacagcgtgaatcgactactgccattgaggcatcttcatacggaatatgattgaagcgtcatgaacaaggggacattttgattgccgctgcggccgccacagttttgcaaggggacatgggcctgggggtgcgaagcgtggagctccctcatttggcactgagtggcctggaatagcggccttaggctgctactgctcctagatattctgttattggtgccccaactactgctactgctgctgctacttatgctactgctacttatgctactgctactaatcctactgctactgctactactgctactgctactgcggctgctgttattgctgctgttgccctagtaatcctttcgcttcttgtttttggccagggctcttgccctaaccctcctccctcgctccgcaacctcggctgctgctcgcctcttcggacttaacacccttcccccctcctggacccccctcccgccttccgttcttctccatccttcccgtctcccatcccctctggcaccagcttcgccaaagtcaagtacatcctcaacagcctct

SEQ ID NO: 116649 - DNA, 815 bp, Volvox carteri
  Intron number 1 from transcript 105881 (locus 105881) deri ved from phytozome v7.0 (chr-ID scaffold_35; pos 966512 to 967326)
gcctattcgccaaggacggcacactgcaaggggtaagagcgccagagtcctatcgttggtggtggtgctgctggtcgtgggcgaagaaatacattcctgttttgcagcgtgacccattgggtgaccacccgtgatccattgggtgaccacccgagcctggcgcaggatgaccaacccctctggttgtggccagtttctggagtactttctgctgccttttggctgaactgatgtttcattgtgatggtgatggccgttgtgtgagggaggagcggctctttcctcctccgaaaccgatatcacatcgcacggggcaattaggaagccgtcacatcgtagccaagacattctctccttagacttgcgcacacggcgctcgtttcccccctaggctgcgtgttgcatatctgaaattcggcaccgcagcgcgcgaactgcaaattacaagccataaatcaaagctttcagaatttttttacaggatccttatgaacgggctcgttctggacgtttcgattacggaaatctgaacgtttccaatacgaatgttgggcaggcgccatcggtgacgctgctttgaatttgtcgggacagtaggcatcagcaaatccaccaagcttctgaccaagaccaagcagaggctaatgaacacgattattgctatgataacaccaaaaatgtttttccagggatgtcgccatccctcacatgttctctttgtcttctaccacttgcagcgttagttgctcgtttcttctccccccgccttcttcctttccctccttcctcgcggtccgcctaggttgttgaggact

SEQ ID NO: 116650 - DNA, 1025 bp, Volvox carteri
  Intron number 1 from transcript 98115 (locus 98115) derive d from phytozome v7.0 (chr-ID scaffold_68; pos 318338 to 3 19362 reverse strand)
aaaagcttccaggtaagctccagcagtccttggtggcccacttgaagagtacagtccgcgatgttagccctgaacggttaatgccatccataatgagggaaactccgaaacatacgcacgcctggctgggcgctggcgcaggcggcccgttaactcatagtgcgcaggtaggaaggaagctttgatgtgggattaccgtcctacaccaaatagtaacattttagtctcgtatgaggtatgctaggaaaccttcacaatgtcatttccttggtcgcagcctcgcctatccgcgctcgtcggggaaacgaagattgtggaaattttggtttgcgtataattaccgtgcgtgctgacgaaatgctcttcagctgaccaacaggtgtagaacagactcgtgatggacatgcttttcgggggcaaaggcattgaatcgtcgtcgtacatccgctaacaatttgcttcagcgtccgcgaaatcccacaaaaatgcaaatattgttgttctttggactatcttattaaattctgttccgtcccatagcatggccatgattcgatgtcccctaacggcctgaggcatggcaataagaggtttctttgttttaaaagacacggcaaaggcacgttagggtttccaaagcatgacggaagatgtggaggctcttttctctgaggcaagcgaaaccgggttagagtggcaagccgcgccgccaggcccttcgtgcgaacccctcggacgagctgctcacaaagaacccttccgcccaaatgactgccactagttccttactgcatgttacacacgatatcattcgcaacacaggacgcaatcgctctcacgtaccgtaacctgttgccacgcacacccggacggagtccgcttcaaaaccttaactgagtgacaccccgcatgaactcgcaccattcaccacaaacatccccccagtcaaatatcccctctgtctcttccactcctgtcatatacccgcaggcatccgcccttcacagctccggaaccgaccttca

SEQ ID NO: 116651 - DNA, 1041 bp, Volvox carteri
  Intron number 3 from transcript 121447 (locus 121447) deri ved from phytozome v7.0 (chr-ID scaffold_53; pos 928047 to 929087 reverse strand)
cggcacccacggcggcgagctgcttgacctgatcggtaaggtttcccctacatttggccgttaccatagttatgacaccgtcttgttgcaataataagtacatgtggtttgcatgtggggccggctggctgcgatgaagtgcgatgctgcgtgatgatgaaaagcgactggttctggttggcatgctttgcgcctgctccccatccctagagcaatcatgtcctccaaacattcatcagcatccaatgctcacagatcatgatgtgtttcattcattatccattcatcatttgctctgtcacctaacaaatttagttttgttttgtgtgcccacctagtcacaaggcttcctgatttcaacctgcttgccttgcggtttgctctacttcctgtcgagcgttgtcacaagtttagcctaggttttgttgtcccctatctgcacgccacggatcgcgacggcgcaaaaccacactcacgttagaacgtcacgtcacacgccatgcctctgtttccacttcttctgcaagggcgcaacccgacacagcccaaccacctaaggggttaccctcgcgccgccggggtggtgtgtttcccgggcatgaaaaggggatggggaatttcccgctcgtagtactgtgactcgcacatcgctccgaaacccggaaatattttgcaggccgcagtacggcgagtgtcaaaccggcagcggcgggggaggagatgacagaggagcaacgcgcagcactggaggcgcggcgatgctcgtccagaggccgtggtcgcgggcgcgtgtacgatagtaaccttggtacgagacgctcgcatatacacactcattctcctcacttcacccatttctcatttcacgcggccctgtttctttggaaacgcacccacccgcagcgtttgggcgcccttgctgagaagcacgtccacctgctcccgcttttgacgtaagcgatgttccacttagttgttgacccatatcgcccggccatgccatgtcatgcaggcctcacctgccatttctgccgccagaag

SEQ ID NO: 116652 - DNA, 300 bp, Volvox carteri
  Intron number 1 from transcript 100811 (locus 100811) deri ved from phytozome v7.0 (chr-ID scaffold_160; pos 37771 to 38070)
ttcctagcgaagaaaggctagtttcagcctggcaggtggggcagggaaagctttgagttgttggttttgggtttgggttttgggcacgttctctgtggctcttttccttctataattatgttttttgttttgtgttactgccggtatcttctttgtttgcagttttaaccaaatcatgtcgtttttctcccctcccttcccctcgcctccgactggccctccgctgtgtcccatccccccggtcatcccaacaccgcacctctccctcctcactgtgcggcacccagagaccagctgcct

SEQ ID NO: 116653 - DNA, 645 bp, Volvox carteri
  Intron number 1 from transcript 101962 (locus 101962) deri ved from phytozome v7.0 (chr-ID scaffold_21; pos 980820 to 981464)
tgggagccgcgtacgagcaagtacgaagccacgcggtatgtacggcgcgtaatggtgcaaaaggaaagatctccgagggactagatggggtgtacgacacgtgcaaagctcttccttgtaccttgaaacatgagtcacacgtgagtacgactcatgtatgtatgtctctttgcgcgatgtcactctgtgctgttgtactgtacgtagggttgtgcgtgtgtgtttgtgtgtgtgtttgtgtgtgtgtctccccgggccgtgcatgtaaaaccgttgaaacccttgaaccctttattaatccaatccttagaagcaatccttagaacttcgggtttttaatcccctgtacgaccaccttagatcaaacaaacccctcccaatcacctccatcagctcctgaagcgccctcacaccccctcgggcacacacaccccctcgggcacacacaccccctcggccacacacaccccgggcccccctctctccccgaagggggctggaaaccataacagcaccatcagtgatgtcgccgccgccgccgcgtcgtcgtcgtgtctttttcaatagagaaaactctgaaaatacttgcactcaatgtacgacatttcaggtcatcgtacgacggtgcgacgccgccgcccatcc

SEQ ID NO: 116654 - DNA, 569 bp, Volvox carteri
  Intron number 2 from transcript 87177 (locus 87177) derive d from phytozome v7.0 (chr-ID scaffold_4; pos 2323104 to 2 323672 reverse strand)
tacgattatacggcaggtgaggagaagacggagtatgtatatatgacttagagtatgtatatatgtatgccgcaataatgcaactgcctaagcggcaggctacacgcattaattcaaaccaccacaaactggaacgcatcctttttgtggccaacattggttggttggttgattggttggttggttgattggttggttagggccgcgaaacaggtggtctgttggatggaagatgcggcgctcgtcacgagaccactgctccgacacataatctcagaaccacctcgacaaaaaaagagccggaactgcccgcgcgtgcataccgtagtgctacttatagttcgtgctacaataattcggaggcaccacgaatatgtagcacgtacaaattctaaggtatcccaagggaccgcagccccgaagtatcgtaccctccgaagccggtcgatcaaacttcgcaaaaattaggatttcaaggcggaaatcagctctcaaatacataaaatatagtcataaacgtaggacatgaacaacgctggaaaacgtgcaagacaggcaaccctgcttca

SEQ ID NO: 116655 - DNA, 836 bp, Volvox carteri
  Intron number 1 from transcript 94457 (locus 94457) derive d from phytozome v7.0 (chr-ID scaffold_37; pos 930512 to 9 31347)
agctacaacacgacgtgcaggtatgtatgtatgtagttaggtagttaggtacgacgtaatggttctacagtgatggccctggtgcaatgtgcggtggcgtgtgcggtgggatttgggttttggttatcggggggtaacggggtgtacggcgggttacatctagcttggatgtgcaggaacgaggtggagaggagcagtacggagttcgtgggtctgtcgtacatggcacacagcggacgtgcacatgaggtgcatgcaaaaaggtgcaaatgaacaaaaagagaaattgacgcgttgggccctaaccctaaacccccgaaaacagcaactgacgtcaaaatttaagctggaagtgtcgcaccgcactgccctctgcaccgcgcctggtgccatcggcatccccttcgttccccatctcctttagggaacaaggggatggggagcgaaggtactctgtgatcgctgcatcgctgctgcgacattgaaaatacaaaggttttccttgcagttttaatcttgaaaagcaacaagctactccgtgtgcagggggtgactggggttgggtagcgtagtgccggtaagttttggtaacttcttgaattggagggacttggtgttgaccgctccgaaactgccaagggaagtttcggctgacaaaacattggaggtggcgttccaattgtgagttgagttatcaaaacttaccggcacgacgtgccttcctctttatgtgtcaatcattaattactgagaaaacaaacagacagagtgccattaatagcctttttttaatcttccgtttcgcaggactttgacggagccagttgacgtgtacc

SEQ ID NO: 116656 - DNA, 674 bp, Volvox carteri
  Intron number 1 from transcript 101029 (locus 101029) deri ved from phytozome v7.0 (chr-ID scaffold_298; pos 7220 to 7893 reverse strand)
gagggcgccggtgagtttgaacaaactatcaagttcttctcaatctaaagatgctccactatgctcattttcttgtcatgaagcaaggctttgtttcggcctggcacggggacgccatggttggaactgcaattgatgagcctttatgaccaatcaaaacatctttggcttgcaaatgccaattcaagtcattaaagaattaaatctctgttacggaagttgtaagttatgccccactgtgcgctctcaagcattttcgcagcatacgaaagcatttcgcaaacccaggcgctcttcatttcaatcaggtacaaaatagacttaacaagcaatgtgaagagccacccagtaaacgagtgcggaagatgtattaaagttttacctcaacggaatgcttttatagccataccgaagcgaaatgccctcacgcaccaagcagaatttacaattccttacgaccagtttaggctatgcaacgacggtatgccgtgagacccattccctggagcgtccaccacatcacgacaaaacgatcgatgtttacaacgcgtacgaataaaggaatcttgtcctactgcacccaacgcatcaagctgccgtttcctccctctgcccccaattcccaaatgcgcatcgaaccggactgcccccaacggatgcagtatctttggctc

SEQ ID NO: 116657 - DNA, 801 bp, Volvox carteri
  Intron number 3 from transcript 88724 (locus 88724) derive d from phytozome v7.0 (chr-ID scaffold_10; pos 49667 to 50 467)
ggtgcttcagctggaaacgggcttcagcctcgaaggtgcgttttgccgccattcctgcgatgctattcgccgagcgatgtatagcgatcccgttcgagcatcatctcatattcgagcgcgcccatatgtgtcctgcggcatccagccgcttcgctataggcagggcgcgcgttgggttgcgacaagtcatgggaaacgcgcaagtcccaggggcatagcgggcgtgtactcacagcgatcagcagccttggggtatacaatcctactggatttgatttgggtcagagcatttgagacgtgggaaggggaatgcatcatttgcggcgttggcctgccgtcattggaatgggaccaggttacggccatctcgatttgggtcacatgccagggacgtgctcttcctcttgaaggtccgcgttgtggggcccccagggaggttagcacccaaagattaatgatagtatcctgctgcctcctgttctcggagtccctttgtagtttcgcactcatcgtccatcttcacagagcgccaacactgcctctctgcgcttgacccatatccagttcttgttcagttcgtccatcttcacgttggtaactcatatccggttcttttgtcctaaaccgatgccgattcttcatggattacccatgcccgattctcaataggtctttttccctcttatgcggacttaaaccaaaaaaacggctttactcgtgcgtggtttgtctttccccaacccgaatcccccaatgctatgagcagactaccgtggttacaactgctggaaccgtcgggaa

SEQ ID NO: 116658 - DNA, 1008 bp, Volvox carteri
  Intron number 3 from transcript 119235 (locus 119235) deri ved from phytozome v7.0 (chr-ID scaffold_56; pos 262487 to 263494 reverse strand)
caggtatggcaacagcttttagtgcaacacggaacatctaaacatctaccagatgcaattgtacacgcttttctatctcatgtcgagagcttacttcaacgcctgtgctttgtttcttgactctgtagcacaccttacctggccataaaatttcaccaagtcaacattcgcacgacgatcgactggaactatctaccatggaactatcacatcgcaccttatgtttgttttatgtatgtgtgtatgtatgtgtgccacaatggtgtgcccgcaacccctgcgctgctgcatgtcgtcagctcatgaattttacagcttgaacgtgcggcatacattataatgcatgccgcttcttcgttgggctttttttacttttggtgccccccacaggaccggccagctgctgagttcgacattgaatacattgaagaggaaggggaggaagggccgtacatcgaaatggcaagtcagctttcttcctcaaaaacacgcactcctcaatgccagtctctctaccttttctttgcattatagtcctacaactgctgtgggttgcatgctcgagagaaagcacaagctcgcttctgataaccaagcgtgtatggcacaccatccttcgaacacttggtcccccacctctcctttgactgcgacctgtctcattaaacccttctggtcaatcaaccctaggtcaacggggaatccatcgattgatcttatctagcccagggaaacgtactgttcggctggttagctaaaattgccattatcgcacacttctgcatgttcggatgggtggttctggtttccttgtgagaacttagactggttaccaaccccacggcatgcacggcagccttacacgaagccataccgcagagcaggaagggcgtttaacgttgtcggtgttaatcgacatacatctgcaattacatgcgtcctgcccttcctccgctgcatgctatgcatgcaggatcttgcctgtggacttttggagcttcgcgacgt

SEQ ID NO: 116659 - DNA, 870 bp, Volvox carteri
  Intron number 1 from transcript 61790 (locus 61790) derive d from phytozome v7.0 (chr-ID scaffold_26; pos 771970 to 7 72839 reverse strand)
cgtacgagcacagcgaggtgctggagtacccacaggtaagcgggtttcggagccccgcgaatcactcacctaaaaatttctgatcagacgtgagcggcatacgggcccccgcttaagctgccatctgggtcggcggatgttcgaatctctgttggcatctctgttgggaaggaaaggaaaatttgcgctgcggatttgggttttcgggattcggccccgatctgggtcgggctcattcaaatatttaaactcaaaccgccttggctgtatttgtattatttgtgtttggggaggtacaaaccggcggtttttgagctctgccttggtttgaatttaggtttgaattaaggtttgaattgaagatccgggccccaagatccggatctgggtcggctgatctgggccaaggcgacctcgatttgggtcacagctgtgttcgtgatgggaccgtcacgcgcgggtcggctggggcgctcttcgcgtatgcgtcagcagcaggaggaccccgatttgggtcggcttctctcttagaggagaagaagaccatggcgagcctcccgcgagtctgtttttgtgggaaacttcttgacctctgccgatggtagtactctcgtacaacccagccatcaaatcttgaaaaacccgaaaagtctgaaacccccgcatcgctgaaccccaacaccaacttccccccggcaacaaacccccagctccaacccaacgatgatgattaggccgtctgcagttgcgtctgctttgcttcttacgtatgattccctgatgtacggtgtcgtacatgtcctgtattataatttcctcttttgcttgccgctaggtctatttcgtgggtcgttcgtcggctcagaaggt

SEQ ID NO: 116660 - DNA, 870 bp, Volvox carteri
  Intron number 3 from transcript 104520 (locus 104520) deri ved from phytozome v7.0 (chr-ID scaffold_16; pos 1468690 t o 1469559 reverse strand)
ttcggggcgccctgcaacggaacggtggcctcacggtacgatacggcgcggtgctgtacgataacagtacagcagcgattggattgcaaagtgctgctccttaacaggaaagttcatgttgctctggaaatgataagcaattgttttattgatgaaatattttattattgaaagtactgaagactgtgtaatgttgcgaagaagataaaggctagatagggtaggagaagatctggcagagcgtcggcaattgttcaccccgtggagccgtacggttgtacggtcctgctggtgcatggggagcttggagtcgccaacaccagcaccgtacttcaggcccctgctgaatcacttcgctttttgatgtacgcatcggcagtaccgcgaagggcttccagccttcaaaagaggaggcgtgtatccgcctctatgcgcttgcctgtgtttaaatggggggttggcacagcaggggttcggctgcacccgggaagtcagtgcttctttgacgctcctgctcctgccaagggaagtttgttggttagttgcagctgttttctgcatctcccatgtctgatcgaatctctttaaccggatctggatctggatccgggttgtgatggatgcgatgcggaatgaaataatcttcttgatgacgaccccctaggatccaggatcccgtccttgtcccttgcaaccctagggctcgctcttgggagctgtgtccatttgcttcccccgtgccgtcggccattgaaaacaaattacctgattatctcaaaaccaccaacatataatgtaaggtttgtaaaatacccctcccccctccccttccctcgttagctcccccgggagaccgtggttcgagacgtg

SEQ ID NO: 116661 - DNA, 859 bp, Volvox carteri
  Intron number 1 from transcript 85967 (locus 85967) derive d from phytozome v7.0 (chr-ID scaffold_1; pos 1763770 to 1 764628 reverse strand)
cagtgggtcacacgcctacgatgtgcctggcgcgggacgatgctcgacacgtatgcgaaccttgctgtcggcgtccaataatccaaacgccagtcgaggtgatgcatgaatagtccaaagtcaatgagatttatccataaagccatcctggacgtacataaacttcagttcacgaaggctgtgaaaaagacgggccgaaccaccttcgaggctgaagccaacccgtgtttcacaatttactttgctttaatgttatttatttatcatcttccgtgtgcaaccaacttcagccctctgtgaagaggcacagccagcagagcaatgaactgcagcccgctcacaacggcaatgtgaaccataaaagctcaaagatttcaatttaaattaaattattaacgcgtgtcaaaggccatgtggcaacgcctgcctggcgttccatcgtcttctatacttaaggtttttttagtttgaaaagtaattgtacgatcctgcaggaccagccttttcaagctgtgacttggttttttactacaggtgtggagctgtacgtacgcattaggtacttcttttcagcagtaaatttggaatccaaagcaggaaggtatgggacgggtagcgcgaatggatcaatttttcttagagcacgtgcctcgcaagactcgtgacaagcttttgatgcaacatacgtgaaatgctccaaaatactgcgtatctggcgtctcatggacggcgcaacgggaccatcccagcagcgctcggcaataagcagcgttattgtgggggctggagtcactggtctggtctgtgcatgtgctctgctggaggctggtgtaagcgtcgtcgtggtcgaggcagcccc

SEQ ID NO: 116662 - DNA, 1019 bp, Volvox carteri
  Intron number 2 from transcript 106331 (locus 106331) deri ved from phytozome v7.0 (chr-ID scaffold_41; pos 1076973 t o 1077991 reverse strand)
gagggcgcggaggagctgccgccggtaagggagtaagggctgtgggtgggtaagagaggaaggaaaagcgccatcacctgtcgtagtgggattaatgggttggggctccaaaggaaaacaaaaatgattacggttgtgacccaagttcgcgcgtgtggatcggaaaagcagtttgagcagaaaaagaggtggacaaagctggatacggtaagccgaaggaaggaagaggatcatgaggactaggggaaagggtaagagcgcagagttctttgccagggcgggaaagtagggaaagctgaatgaggggcttgagctatgataagatatggcgcgagatgcaacctgaaggaattcctcttccctgtgtgctgggttgtcaggaaagtaaaggtaggtttcacgtttggacgtatgactctgaagggtggggtgggggtggacgcaaactggatgggggaggcctgcttgtttgcggatcagccaccaagctgctagccaaggaccgaagatgagaaaatctgatcaggtccactgttgagcgaacggctgcatgccttttaagcaggaattcagcagcgagaaggaagtgctggggattgccatacgaataacatccccgaagcttcttgtttgtgctgggtttatggagtatggagtatgggataagtccgggtgcagggtgggatggatgggagcatgtggttttccttgtgacgtgtcgccggatagggggttaggcggtcgtgttctggggtctgggggcatgaggaaaggggaagaaatgttgtggttggctttcttgtcgtcgatgggatacagtcgatggggcatgctgcggtgtaatgcggcagaggatgagctaataggaggaggccatctggaggagtcatgtccagggagggtcaggtcggccctaataattgcccatcttttgttatttgattttttctccttcctttcccctaatataccaccaccaatatatgcccccatgtacgcattctctgtgccgtaggcac

SEQ ID NO: 116663 - DNA, 622 bp, Volvox carteri
  Intron number 1 from transcript 71025 (locus 71025) derive d from phytozome v7.0 (chr-ID scaffold_227; pos 8728 to 93 49)
gcacaatcacatctctacaaaaattagccaggtgcagtggcgcacacctgtagtcttagctactgggaagctgaggtgggaggatcacttgaacccatgaggtcaaggctgcagtaaccaaggtcatgccactgcactccagcctaggcaatagagcgagaccctgtctcccagaaaaagaaaaaagaaaggaaaagtcggaaccttcctctgtcgcctaggctggagtacagtggcatgatcataggtcatttacctcaggcaaagagacaggctttcaaataatgtttctaactataagaaaatgtacagttcttttattctagatagttaattataatagaattggtgactttgaagtcagtgggttatttatcttgagggtggtgagcaaattcaactgcccttggcaaacagtagtttacagctttaagggcgcaaacacccttccttacaacagtctaataaaaggagtttcatataaccagcattcattgtttcaaggttacaaatccacagcccctgcaggtaactgttacaataaactgtcaactgtgacaggaaagtcttctgcctttgaaatttaggaacttggccagtcctggtggctcacacctgtaat

SEQ ID NO: 116664 - DNA, 959 bp, Volvox carteri
  Intron number 1 from transcript 97429 (locus 97429) derive d from phytozome v7.0 (chr-ID scaffold_60; pos 812909 to 8 13867)
ttggtgagagagaagcagggagggagtaggtcagggatcgcgcgcaagggaggacagaagcagcagctccttccatgacgccacttcaagcttttacgattcgtgtcgcctttttttatatttttgttctctcattatgcttaaaaagtgaacgcgcgctggccggaagcgagcgaggcaggcggtccagcaggttgaggtgattccggcgtcgaaaggagcactggattgcaccggagacagatcgcagccagaagagagaaactgaattcgtcacgcctctcataaaatgcgcaaatcggtggtgcgaagtgcccacacccagcagctctcccaagaccttttcggtcgcttcggcctcgcgatccagagcagcctgacttgcaaaaggcacggcttttatatacaaagctattagttcgtatggtgtcgacgatcaatcatcatggaatgggtgttaaatgcgtcatttgcgatcagctcgcacagcgcgtggcgggaaatggtcctggcggcagctgtgccacctctcgggggcagtgcggcgctcattccggttcgggggctgtgcacacacaatgagccagtcgggggctccgcggcaacaaaaacaatgccgtcatcatttggaaaaaacttgggaaacatcaaaaacaacacgaaaaacatgtgcgcatgcatattccgtcatacttccttcttccacggcccttcgggtctctctcttttcaaatcccagcatcggtttacgacctacactttgcaaaatttggcctacatccgcccaatttgtttttagtgcttgaaacacttttgatgtcggtttattattataccttccatgtgacattatgatgtataactaataatttagcttttcatctcgccaaccttaattgctccccgtattccctgtcccctcaggcaggcgacttgcccaggaccagggcggctccaac

SEQ ID NO: 116665 - DNA, 273 bp, Volvox carteri
  Intron number 1 from transcript 75691 (locus 75691) derive d from phytozome v7.0 (chr-ID scaffold_35; pos 1283988 to 1284260 reverse strand)
catttcctcttcttgtcaacgctggcggtcgggtggtaaggatcgcagacaatattttgctcctacgcttccctttttcgccaagatttgattaatattatttattaatttattcctaatgttttcttgtcagaagatcctctgttatcgctgtagatgaccaaagtgaaacgactttcccgcagttcatgcttggcagatcctgctgctcagtgttgcatatacgtaagaattaatgtttttgtttcattccattcagggccattggtgcgg

SEQ ID NO: 116666 - DNA, 999 bp, Volvox carteri
  Intron number 2 from transcript 81413 (locus 81413) derive d from phytozome v7.0 (chr-ID scaffold_22; pos 1531537 to 1532535)
tcggcacccgcgtcgctgccgccgctcgccgtgtggtaggcacttcgggtatcattgcgccgcattccttaacgcctatcctactctccatgttcatcgtatttccatgttttgaccacatagcttatagctcaacagtcttcgaagccctccttgtgtgggctgtgatgatctgaattgcatatcgccgcgcgttacttcttgctaatggatgtcgacacaggatacgtcagcccgtgtctttctgttatcaagccgttcgtagtttgcctcgggatgtgctgccgaaagcgtcgtgacatctatatacttcgtgctgcgggtctcgcacccagccgcaagacaggtgcctctgtctattgaacgcatcgctgtgacgtctgcgggcgtctggaaggggcatggaacaggcggcaagcaaacagccccccaaaagcaaaaccgaaaataagaaaaggaaaaaaaggggaacgaaaaccgaggtgataccctgtaggggacaccatgtcgtttattccccctttggctttccaaagaggatccccctcaatgggaaaatgacacctaggggaatcacttccgttttgttcttttcacaaaaaggatattttgccagaagattatccgaaaggggacattcagaagtggggaaaggaaggagcccttacccttcggtcagtcttaatgaggaatcctccgaatccgaagggatgcgcaaaacgcgttcaggcaggtgggcgttacgaaatctctgtagcacttacgaaatcctattcccctgcccccagcccccaacccatcacctgtttgagtcctcttttttgctttttgctttttttagattgaataccgaaaacgaaaacaaatgattgaagcaaacctggtgcgcaccttccttcttcatcccaacctgaccatctctccctccctccctccctccccctccgcgcgcggcgccctcaagactgtggcggttcgtgccgcccataaccccgccgc
